(19) United States
(12) Patent Application Publication
(10) Pub. No.: US 2006/0217300 A1
(43) Pub. Date: Sep. 28, 2006

(54) Analogues of glp-1

(75) Inventor: Zheng Xin Dong, HOLLISTON, MA (US)

Correspondence Address: Brian R Morrill;Biomeasure Incorporated, 27 Maple Street, Milford, MA, 01757-3650, US

(73) Assignee: BIOMEASURE, INCORPORATED, MILFORD, MA (US)

(21) Appl. No.: 10/546,303

(22) PCT Filed: Feb. 17, 2004
(86) PCT No.: PCT/US04/04421

§ 371 Date: Aug. 19, 2005

Related U.S. Application Data
(60) Provisional application No. 60/449,203, filed on Feb. 19, 2003.

(51) Int. Cl. A61K 38/26

(52) U.S. Cl. 514/12; 530/324

(57) ABSTRACT

The present invention is directed to peptide analogues of glucagon-like peptide-1, the pharmaceutically-acceptable salts thereof, to methods of using such analogues to treat mammals, and to pharmaceutical compositions useful therefor comprising said analogues.

### SEQUENCE LISTING

[0001] The instant application contains a “lengthy” Sequence Listing which has been submitted via four CD-R in lieu of a printed paper copy, and is hereby incorporated by reference in its entirety. Said CD-R, recorded on Feb. 10, 2004, are labeled “CRF”, “Copy 1”, “Copy 2” and “Copy 3” respectively, and each contains only one identical 456 Kb file (129PPCT2.APP).

### BACKGROUND OF THE INVENTION

[0002] The present invention is directed to peptide analogues of glucagon-like peptide-1, the pharmaceutically-acceptable salts thereof, to methods of using such analogues to treat mammals and to pharmaceutical compositions useful therefore comprising said analogues.

[0003] Glucagon-like peptide-1 (7-36) amide (GLP-1)(SEQ ID NO: 775) is synthesized in the intestinal L-cells by tissue-specific post-translational processing of the glucagon precursor preproglucagon (Vamdell, J. M., et al., J. Histochem Cytochem, 1985:33:1080-6) and is released into the circulation in response to a meal. The plasma concentration of GLP-1 rises from a fasting level of approximately 15 pmol/L to a peak postprandial level of 40 pmol/L. It has been demonstrated that, for a given rise in plasma glucose concentration, the increase in plasma insulin is approximately threefold greater when glucose is administered orally compared with intravenously (Kreymann, B., et al., Lancet 1987:2, 1300-4). This alimentary enhancement of insulin release, known as the incretin effect, is primarily humoral and GLP-1 is now thought to be the most potent physiological incretin in humans. In addition to the insulinotropic effect, GLP-1 suppresses glucagon secretion, delays gastric emptying (Wettergren A., et al., Dig Dis Sci 1993:38:665-73) and may enhance peripheral glucose disposal (D'Alessio, D. A. et al., J. Clin Invest 1994:93:2293-6).

[0004] In 1994, the therapeutic potential of GLP-1 was suggested following the observation that a single subcutaneous (s/c) dose of GLP-1 could completely normalize postprandial glucose levels in patients with non-insulin-dependent diabetes mellitus (NIDDM) (Gutniak, M. K., et al., Diabetes Care 1994:17:1039-44). This effect was thought to be mediated both by increased insulin release and by a reduction in glucagon secretion. Furthermore, an intravenous infusion of GLP-1 has been shown to delay postprandial gastric emptying in patients with NIDDM (Williams, B., et al., J. Clin Endo Metab 1996:81:327-32). Unlike sulphonylureas, the insulinotropic action of GLP-1 is dependent on plasma glucose concentration (Holz, G. G. 4^{th}, et al., Nature 1993:361:362-5). Thus, the loss of GLP-1-mediated insulin release at low plasma glucose concentration protects against severe hypoglycemia. This combination of actions gives GLP-1 unique potential therapeutic advantages over other agents currently used to treat NIDDM.

[0005] Numerous studies have shown that when given to healthy subjects, GLP-1 potently influences glycemic levels as well as insulin and glucagon concentrations (Orskov, C, Diabetologia 35:701-711, 1992; Holst, J. J., et al., Potential of GLP-1 in diabetes management in Glucagon III, Handbook of Experimental Pharmacology, Lefevbre P J, Ed. Berlin, Springer Verlag, 1996, p. 311-326), effects which are glucose dependent (Kreymann, B., et al., Lancet ii: 1300-1304, 1987; Weir, G. C., et al., Diabetes 38:338-342, 1989). Moreover, it is also effective in patients with diabetes (Gutniak, M., N. Engl J Med 226:1316-1322, 1992; Nathan, D. M., et al., Diabetes Care 15:270-276, 1992), normalizing blood glucose levels in type 2 diabetic subjects (Nauck, M. A., et al., Diagbetologia 36:741-744, 1993), and improving glycemic control in type 1 patients (Creutzfeldt, W. O., et al., Diabetes Care 19:580-586, 1996), raising the possibility of its use as a therapeutic agent.

[0006] GLP-1 is, however, metabolically unstable, having a plasma half-life (t_{1/2}) of only 1-2 min in vivo. Exogenously administered GLP-1 is also rapidly degraded (Deacon, C. F., et al., Diabetes 44:1126-1131, 1995). This metabolic instability limits the therapeutic potential of native GLP-1. Hence, there is a need for GLP-1 analogues that are more active or are more metabolically stable than native GLP-1.

### SUMMARY OF THE INVENTION

[0007] In one aspect, the present invention is directed to a compound of formula (I),
(R²R³)-A⁷⁻A⁸-A⁹-A¹⁰-A¹¹-A¹²-A¹³-A¹⁴-A¹⁵-A¹⁶-A¹⁷⁻A¹⁸-A¹⁹-A²⁰-A²¹-A²²-A²³-A²⁴-A²⁵-A²⁶-A²⁷⁻A²⁸-A²⁹-A³⁰-A³¹-A³²-A³³-A³⁵-A³⁶-A³⁷⁻A³⁸-A³⁹-R¹, (I)
wherein:
[0008] A⁷ is L-His, Ura, Paa, Pta, Amp, Tma-His, des-amino-His, or deleted;
[0009] A⁸ is Abu, β-Ala, Ser, Gly or Val;
[0010] A⁹ is Glu, N-Me-Glu, N-Me-Asp or Asp;
[0011] A¹⁰ is Gly, Acc, β-Ala or Aib;
[0012] A¹¹ is Thr or Ser;
[0013] A¹² is Phe, Acc, Aic, Aib, 3-Pal, 4-Pal, 1-Nal, 2-Nal, Cha, Trp or X¹-Phe;
[0014] A¹³ is Thr or Ser;
[0015] A¹⁴ is Ser or Aib;
[0016] A¹⁵ is Asp or Glu;
[0017] A¹⁶ is Val, Acc, Aib, Leu, Ile, Tle, Nle, Abu, Ala or Cha;
[0018] A¹⁷ is Aib, Ser or Thr;
[0019] A¹⁸ is Lys, Ser or Thr;
[0020] A¹⁹ is Tyr, Cha, Phe, 3-Pal, 4-Pal, Acc, 1-Nal, 2-Nal, or X¹-Phe;
[0021] A²⁰ is Leu, Acc, Aib, Nle, Ile, Cha, Tle, Val, Phe or X¹-Phe;
[0022] A²¹ is Glu or Asp;
[0023] A²² is Gly, Acc, β-Ala, Glu or Aib;
[0024] A²³ is Gln, Asp, Asn or Glu;
[0025] A²⁴ is Ala, Aib, Val, Abu, Tle or Acc;
[0026] A²⁵ is Ala, Aib, Val, Abu, Tle, Acc, Lys, Arg, hArg, Orn, HN—CH((CH₂)ₙ—N(R¹⁰R¹¹))—C(O) or HN—CH((CH₂)ₑ—X³)—C(O);
[0027] A²⁶ is Lys, Arg, hArg, Orn, HN—CH((CH₂)ₙ—N(R¹⁰R¹¹))—C(O) or HN—CH((CH₂)ₑ—X³)—C(O);
[0028] A²⁷ is Glu, Asp, Leu, Aib or Lys;
[0029] A²⁸ is Phe, 3-Pal, 4-Pal, 1-Nal, 2-Nal, X¹-Phe, Aic, Acc, Aib, Cha or Trp;
[0030] A²⁹ is Ile, Acc, Aib, Leu, Nle, Cha, Tle, Val, Abu, Ala or Phe;
[0031] A³⁰ is Ala, Aib or Acc;
[0032] A³¹ is Trp,-1-Nal, 2-Nal, 3-Pal, 4-Pal, Phe, Acc, Aib or Cha;
[0033] A³² is Leu, Acc, Aib, Nle, Ile, Cha, Tle, Phe, X¹-Phe or Ala;
[0034] A³³ is Val, Acc, Aib, Leu, Ile, Tle, Nle, Cha, Ala, Phe, Abu, Lys or X¹-Phe;
[0035] A³⁴ is Lys, Arg, hArg, Orn, HN—CH((CH₂)ₙ—N(R¹⁰R¹¹))—C(O) or HN—CH((CH₂)ₑ—X³)—C(O);
[0036] A³⁵ is Gly, β-Ala, D-Ala, Gaba, Ava, HN—(CH₂)ₘ—C(O), Aib, Acc or a D-amino acid;
[0037] A³⁶ is L- or D-Arg, D- or L-Lys, D- or L-hArg, D- or L-Orn, HN—CH((CH₂)ₙ—N(R¹⁰R¹¹))—C(O), HN—CH((CH₂)ₑ—X³)—C(O) or deleted;
[0038] A³⁷ is Gly, β-Ala, Gaba, Ava, Aib, Acc, Ado, Arg, Asp, Aun, Aec, HN—(CH₂)ₘ—C(O), HN—CH((CH₂)ₙ—N(R¹⁰R¹¹))—C(O), HN—CH((CH₂)ₙ—O(R¹⁰))—C(O), a D-amino acid, or deleted;
[0039] A³⁸ is D- or L-Lys, D- or L-Arg, D- or L-hArg, D- or L-Orn, HN—CH((CH₂)ₙ—N(R¹⁰R¹¹))—C(O), HN—CH((CH₂)ₑ—X³)—C(O) Ava, Ado, Aec or deleted;
[0040] A³⁹ is D- or L-Lys, D- or L-Arg, HN—CH((CH₂)ₙ—N(R¹⁰R¹¹))—C(O), Ava, Ado, Aec, or Aun, or is deleted;
[0041] X¹ is, independently for each occurrence, selected from the group consisting of (C₁-C₆)alkyl, OH and halo;
[0042] R¹ is OH, NH₂, (C₁-C₃₀)alkoxy, or NH—X²—CH₂-Z⁰, wherein X² is a (C₁-C₁₂)hydrocarbon moiety, and Z⁰ is H, OH, CO₂H or CONH₂; [chemical structure]
[0043] or —C(O)—NHR¹², wherein X⁴ is, independently for each occurrence, —C(O)—, —NH—C(O)— or —CH₂—, and wherein f is, independently for each occurrence, an integer from 1 to 29 inclusive;
[0044] each of R² and R³ is independently selected from the group consisting of H, (C₁-C₃₀)alkyl, (C₂-C₃₀)alkenyl, phenyl(C₁-C₃₀)alkyl, naphthyl(C₁-C₃₀)alkyl, hydroxy(C₁-C₃₀)alkyl, hydroxy(C₂-C₃₀)alkenyl, hydroxyphenyl(C₁-C₃₀)alkyl, and hydroxynaphthyl(C₁-C₃₀)alkyl; or one of R² and [chemical structure]
   wherein Y is H, OH or NH₂; r is 0 to 4; q is 0 to 4; and X⁵ is (C₁-C₃₀)alkyl, (C₂-C₃₀)alkenyl, phenyl(C₁-C₃₀)alkyl, naphthyl(C₁-C₃₀)alkyl; hydroxy(C₁-C₃₀)alkyl, hydroxy(C₂-C₃₀)alkenyl, hydroxyphenyl(C₁-C₃₀)alkyl or hydroxynaphthyl(C₁-C₃₀)alkyl;
[0045] e is, independently for each occurrence, an integer from 1 to 4 inclusive;
[0046] m is, independently for each occurrence, an integer from 5 to 24 inclusive;
[0047] n is, independently for each occurrence, an integer from 1 to 5, inclusive;
[0048] each of R¹⁰ and R¹¹ is, independently for each occurrence, H, (C₁-C₃₀)alkyl, (C₁-C₃₀)acyl, (C₁-C₃₀)alkylsulfonyl, —C((NH)(NH₂)) or [chemical structure]
   and
[0049] R¹² and R¹³ each is, independently for each occurrence, (C₁-C₃₀)alkyl;
[0050] provided that:
[0051] (i) said compound is not:
[0052] (Ser⁸, β-Ala³⁵)hGLP-1(7-36)NH₂(SEQ ID NO.779);
[0053] (Gly⁸, Aib³⁵)hGLP-1(7-36)NH₂(SEQ ID NO.780); or
[0054] (Gly⁸, β-Ala³⁵)hGLP-1(7-36)NH₂(SEQ ID NO.781);
[0055] (ii) when A⁷ is Ura, Paa or Pta, then R² and R³ are deleted; and
[0056] (iii) when R¹⁰ is (C₁-C₃₀)acyl, (C₁-C₃₀)alkylsulfonyl, —C((NH)(NH₂)) or [chemical structure]
   then R¹¹ is H or (C₁-C₃₀)alkyl;
[0057] or a pharmaceutically acceptable salt thereof.

[0058] A preferred group of compounds of formula (I) is where A¹¹ is Thr; A¹³ is Thr; A¹⁵ is Asp; A¹⁷ is Ser; A¹⁸ is Ser; A²¹ is Glu; A²³ is Gln or Glu; A²⁷ is Glu; and A³¹ is Trp; or a pharmaceutically acceptable salt thereof.

[0059] A preferred group of compounds of the immediately foregoing group of compounds is where A⁹ is Glu, N-Me-Glu or N-Me-Asp; A¹² is Phe, Acc or Aic; A¹⁶ is Val, Acc or Aib; A¹⁹ is Tyr; A²⁰ is Leu, Acc or Cha; A²⁴ is Ala, Aib or Acc; A²⁵ is Ala, Aib, Acc, Lys, Arg, hArg, Orn, HN—CH((CH₂)ₙ—N(R¹⁰R¹¹))—C(O) or HN—CH((CH₂)ₑ—X³)—C(O); A²⁸ is Phe; A²⁹ is Ile or Acc; A³⁰ is Ala or Aib; A³² is Leu, Acc or Cha; and A³³ is Val or Acc; or a pharmaceutically acceptable salt thereof.

[0060] A preferred group of compounds of the immediately foregoing group of compounds is where A¹⁰ is Gly; A¹² is Phe, A6c or A5c; A¹⁶ is Val, A6c or A5c; A²⁰ is Leu, A6c, A5c or Cha; A²² is Gly, β-Ala or Aib; A²⁴ is Ala or Aib; A²⁹ is Ile, A6c or A5c; A³² is Leu, A6c, A5c or Cha; A³³ is Val, A6c or A5c; A³⁵ is Aib, β-Ala, Ado, A6c, A5c or Gly; and A³⁷ is Gly, Aib, β-Ala, Ado, D-Ala or deleted; or a pharmaceutically acceptable salt thereof.

[0061] A preferred group of compounds of the immediately foregoing group of compounds is where X⁴ for each occurrence is —C(O)—; e is, independently for each occurrence, 1 or 2; and R¹ is OH or NH₂; or a pharmaceutically acceptable salt thereof.

[0062] A preferred group of compounds according to the immediately foregoing group of compounds is where R² is H and R³ is (C₁-C₃₀)alkyl, (C₂-C30)alkenyl, (C₁-C₃₀)acyl, (C₁-C₃₀alkysulfonyl, [chemical structure]
or a pharmaceutically acceptable salt thereof.

[0063] Another preferred group of compounds from among the compounds according to paragraph [063] is where R¹⁰ is (C₁-C₃₀)acyl, (C₁-C₃₀)alkylsulfonyl or [chemical structure]
and R¹¹ is H; or a pharmaceutically acceptable salt thereof.

[0064] A preferred group of compounds of the immediately foregoing group of compounds is where R¹⁰ is (C₄-C₂₀)acyl, (C₄-C₂₀)alkylsulfonyl or [chemical structure]
or a pharmaceutically acceptable salt thereof

[0065] Another preferred group of compounds from among the compounds according to paragraph [063], is where A⁸ is Gly, Ser, or Val; or a pharmaceutically acceptable salt thereof.

[0066] A preferred group of compounds of the immediately foregoing group of compounds is where A⁸ is Gly or Ser; or a pharmaceutically acceptable salt thereof.

[0067] A preferred compound of the immediately foregoing group of compounds is a compound according to the formula:

| | |
|---|---|
| ((N^{α}-Me-His)⁷,Gly⁸,Aib³⁵)hGLP-1(7-36)NH₂; | (SEQ ID NO.1) |
| ((N^{α}-Me-His)⁷,Gly⁸,β-Ala³⁵)hGLP-1(7-36)NH₂; | (SEQ ID NO.2) |
| ((N^{α}-Me-His)⁷,Gly⁸,Aib³⁵,Arg^{26,34})hGLP-1(7-36)NH₂; | (SEQ ID NO.3) |
| ((N^{α}-Me-His)⁷,Gly⁸,Arg^{26,34},β-Ala³⁵)hGLP-1(7-36)NH₂; | (SEQ ID NO.4) |
| (Gly⁸,A6c³⁵)hGLP-1(7-36)NH₂; | (SEQ ID NO.5) |
| (Gly⁸,A5c³⁵)hGLP-1(7-36)NH₂; | (SEQ ID NO.6) |
| (Gly⁸,D-Ala³⁵)hGLP-1(7-36)NH₂; | (SEQ ID NO.7) |
| (Gly⁸,Aib³⁵,A6c³²)hGLP-1(7-36)NH₂; | (SEQ ID NO.8) |
| (Gly⁸,Aib³⁵,A5c³²)hGLP-1(7-36)NH₂; | (SEQ ID NO.9) |
| (Gly⁸,Aib³⁵,Glu²³)hGLP-1(7-36)NH₂; | (SEQ ID NO.10) |
| (Gly⁸,Aib^{24,35})hGLP-1(7-36)NH₂; | (SEQ ID NO.11) |
| (Gly⁸,Aib^{30,35})hGLP-1(7-36)NH₂; | (SEQ ID NO.12) |
| (Gly⁸,Aib^{25,35})hGLP-1(7-36)NH₂; | (SEQ ID NO.13) |
| (Gly⁸,Aib³⁵,A6c^{16,20})hGLP-1(7-36)NH₂; | (SEQ ID NO.14) |
| (Gly⁸,Aib³⁵,A6c^{16,29,32})hGLP-1(7-36)NH₂; | (SEQ ID NO.15) |
| (Gly⁸,Aib³⁵,A6c^{20,32})hGLP-1(7-36)NH₂; | (SEQ ID NO.16) |
| (Gly⁸,Aib³⁵,A6c²⁰)hGLP-1(7-36)NH₂; | (SEQ ID NO.17) |
| (Gly⁸,Aib³⁵,Lys²⁵)hGLP-1(7-36)NH₂; | (SEQ ID NO.18) |
| (Gly⁸,Aib^{24,35},A6c²⁰)hGLP-1(7-36)NH₂; | (SEQ ID NO.19) |
| (Gly⁸,Aib³⁵,A6c^{29,32})hGLP-1(7-36)NH₂; | (SEQ ID NO.20) |
| (Gly⁸,Aib^{24,35},A6c^{29,32})hGLP-1(7-36)NH₂: | (SEQ ID NO.21) |
| (Gly⁸,Aib³⁵,A6c¹²)hGLP-1(7-36)NH₂; | (SEQ ID NO.22) |
| (Gly⁸,Aib³⁵,Cha²⁰)hGLP-1(7-36)NH₂; | (SEQ ID NO.23) |
| (Gly⁸,Aib³⁵,A6c³³)hGLP-1(7-36)NH₂; | (SEQ ID NO.24) |
| (Gly⁸,A6c^{16,20},β-Ala³⁵)hGLP-1(7-36)NH₂; | (SEQ ID NO.25) |
| (Gly⁸,Aib³⁵,β-Ala²²)hGLP-1(7-36)NH₂; | (SEQ ID NO.26) |
| (Gly⁸,Aib^{22,35})hGLP-1(7-36)NH₂; | (SEQ ID NO.27) |
| (Gly⁸,Aib³⁵,Glu²³,A6c³²)hGLP-1(7-36)NH₂; | (SEQ ID NO.28) |
| (Gly⁸,Aib^{24,35},Glu²³,A6c³²)hGLP-1(7-36)NH₂; | (SEQ ID NO.29) |
| (Gly⁸,Aib^{24,25,35},Glu²³,A6c³²)hGLP-1(7-36)NH₂; | (SEQ ID NO.30) |
| (Gly⁸,Aib^{24,25,35},A6c^{16,20,32},Glu²³)hGLP-1(7-36)NH₂; | (SEQ ID NO.31) |
| (Gly⁸,A6c³²,β-Ala³⁵)hGLP-1(7-36)NH₂; | (SEQ ID NO.32) |
| (Gly⁸,A5C32,β-Ala³⁵)hGLP-1(7-36)NH₂; | (SEQ ID NO.33) |
| (Gly⁸,Glu²³,β-Ala³⁵)hGLP-1(7-36)NH₂; | (SEQ ID NO.34) |
| (Gly⁸,Aib²⁴,β-Ala³⁵)hGLP-1(7-36)NH₂; | (SEQ ID NO.35) |
| (Gly⁸,Aib³⁰,β-Ala³⁵)hGLP-1(7-36)NH₂; | (SEQ ID NO.36) |
| (Gly⁸,Aib²⁵,β-Ala³⁵)hGLP-1(7-36)NH₂; | (SEQ ID NO.37) |
| (Gly⁸,A6c^{16,29,32},β-Ala³⁵)hGLP-1(7-36)NH₂; | (SEQ ID NO.38) |
| (Gly⁸,A6c^{20,32},β-Ala³⁵)hGLP-1(7-36)NH₂; | (SEQ ID NO.39) |
| (Gly⁸,A6c²⁰,β-Ala³⁵)hGLP-1(7-36)NH₂; | (SEQ ID NO.40) |
| (Gly⁸,Lys²⁵,β-Ala³⁵)hGLP-1(7-36)NH₂; | (SEQ ID NO.41) |
| (Gly⁸,Aib²⁴,A6c²⁰,β-Ala³⁵)hGLP-1(7-36)NH₂; | (SEQ ID NO.42) |
| (Gly⁸,A6c^{29,32},β-Ala³⁵)hGLP-1(7-36)NH₂; | (SEQ ID NO.43) |
| (Gly⁸,Aib²⁴,A6c^{29,32},β-Ala³⁵)hGLP-1(7-36)NH₂; | (SEQ ID NO.44) |
| (Gly⁸,A6c¹²,β-Ala³⁵)hGLP-1(7-36)NH₂; | (SEQ ID NO.45) |
| (Gly⁸,Cha²⁰,β-Ala³⁵)hGLP-1(7-36)NH₂; | (SEQ ID NO.46) |
| (Gly⁸,A6c³³,β-Ala³⁵)hGLP-1(7-36)NH₂; | (SEQ ID NO.47) |
| (Gly⁸,β-Ala^{22,35})hGLP-1(7-36)NH₂; | (SEQ ID NO.48) |
| (Gly⁸,Aib²²,(β-Ala³⁵)hGLP-1(7-36)NH₂; | (SEQ ID NO.49) |
| (Gly⁸,Glu²³,A6c³²,β-Ala³⁵)hGLP-1(7-36)NH₂; | (SEQ ID NO.50) |
| (Gly⁸,Aib²⁴,Glu²³,A6c³²,β-Ala³⁵)hGLP-1(7-36)NH₂; | (SEQ ID NO.51) |
| (Gly⁸,Aib²⁴,Glu²³,A6c³²,Lys³⁴(N^{e}octanoyl),β- | (SEQ ID NO.52) |
| Ala³⁵)hGLP-1(7-36)NH₂; | |
| (Gly⁸,Aib^{24,25},Glu²³,A6c³²,β-Ala³⁵)hGLP-1(7-36)NH₂; | (SEQ ID NO.53) |
| (Gly⁸,Aib^{24,25},A6c^{16,20,32},Glu²³,(β-Ala³⁵)hGLP-1(7-36)NH₂; | (SEQ ID NO.54) |
| (Gly⁸,Aib³⁵,D-Arg³⁶)hGLP-1(7-36)NH₂; | (SEQ ID NO.55) |
| (Gly⁸,Aib³⁵,D-Lys³⁵)hGLP-1(7-36)NH₂; | (SEQ ID NO.56) |
| (Gly⁸,β-Ala³⁵,D-Arg³⁶)hGLP-1(7-36)NH₂; | (SEQ ID NO.57) |
| (Gly⁸,β-Ala³⁵,D-Lys³⁶)hGLP-1(7-36)NH₂; | (SEQ ID NO.58) |
| (Gly⁸,Aib³⁵,Arg^{26,34})hGLP-1(7-36)NH₂; | (SEQ ID NO.59) |
| (Gly⁸,Arg^{26,34},β-Ala³⁵)hGLP-1(7-36)NH₂; | (SEQ ID NO.60) |
| (Gly⁸,Aib³⁵,Arg^{25,26,34})hGLP-1(7-36)NH₂; | (SEQ ID NO.61) |
| (Gly⁸,Arg^{25,26,34},β-Ala³⁵)hGLP-1(7-36)NH₂; | (SEQ ID NO.62) |
| (Gly⁸,Arg^{26,34},β-Ala³⁵,Lys³⁵(N^{ε}-tetradecanoyl))hGLP-1(7-36)OH; | (SEQ ID NO.63) |
| (Gly⁸,Aib³⁵,Arg^{26,34},Lys³⁶(N^{ε}-tetradecanoyl))hGLP-1(7-37)OH; | (SEQ ID NO.64) |
| (Gly⁸,Aib^{35,37},Arg^{26,34},Lys³⁶(N^{ε}-tetradecanoyl))hGLP-1(7-37)OH; | (SEQ ID NO.65) |
| (Gly⁸,Aib³⁵,Arg^{26,34},Lys³⁶(N^{ε}-tetradecanoyl),D | (SEQ ID NO.66) |
| Ala³⁷)hGLP-1(7-37)OH; | |
| (Gly⁸,Aib^{35,37},Arg^{26,34},Lys³⁸(N^{ε}-tetradecanoyl))hGLP-1(7-38)OH; | (SEQ ID NO.67) |
| (Gly⁸,Aib³⁵,Arg^{26,34},β-Ala³⁷,Lys³⁸(N^{ε}- | (SEQ ID NO.68) |
| tetradecanoyl))hGLP-1(7-38)OH; | |
| (Gly⁸,Aib³⁵,Arg^{26,34},Lys³⁸(N^{ε}-tetradecanoyl))hGLP-1(7-38)OH; | (SEQ ID NO.69) |
| (Gly⁸,Arg^{26,34},Lys³⁶(N^{ε}-tetradecanoyl),β-Ala³⁷)hGLP-1(7-37)OH; | (SEQ ID NO.70) |
| (Gly⁸,Aib³⁷,Arg^{26,34},Lys³⁶(N^{ε}-tetradecanoyl))hGLP-1(7-37)OH; | (SEQ ID NO.71) |
| (Gly⁸,Aib³⁵,Arg^{26,34},Ado³⁷)hGLP-1(7-37)OH; | (SEQ ID NO.72) |
| (Gly⁸,Aib³⁵,Arg^{26,34},Ado³⁷)hGLP-1(7-37)NH₂; | (SEQ ID NO.73) |
| (Gly⁸,Arg^{26,34},Lys³⁶(N^{ε}-tetradecanoyl),D-Ala³⁷)hGLP-1(7-37)OH; | (SEQ ID NO.74) |
| (Gly⁸,Aib³⁷,Arg^{26,34},Lys³⁸(N^{ε}-tetradecanoyl))hGLP-1(7-38)OH; | (SEQ ID NO.75) |
| (Gly⁸,Arg^{26,34},β-Ala³⁷,Lys³⁸(N^{ε}-tetradecanoyl))hGLP-1(7-38)OH; | (SEQ ID NO.76) |
| (Gly⁸,Aib³⁵,Lys²⁶(N^{ε}-octanoyl))hGLP-1(7-36)NH₂; | (SEQ ID NO.77) |
| (Gly⁸,Aib³⁵,Lys²⁶(N^{ε}-tetradecanoyl))hGLP-1(7-36)NH₂; | (SEQ ID NO.78) |
| (Gly⁸,Aib³⁵,Lys²⁶(N^{ε}-hexadecanoyI))hGLP-1(7-36)NH₂; | (SEQ ID NO.79) |
| (Gly⁸,Lys²⁶(N^{ε}-octanoyl),β-Ala³⁵)hGLP-1(7-36)NH₂; | (SEQ ID NO.80) |
| (Gly⁸,Lys²⁶(N^{ε}-tetradecanoyl),β-Ala³⁵)hGLP-1(7-36)NH₂; | (SEQ ID NO.81) |
| (Gly⁸,Lys²⁶(N^{ε}-hexadecanoyl),β-Ala³⁵)hGLP-1(7-36)NH₂; | (SEQ ID NO.82) |
| (Gly⁸,Aib³⁵,Lys²⁶(N^{ε}-octanoyl),Arg³⁴)hGLP-1(7-36)NH₂; | (SEQ ID NO.83) |
| (Gly⁸,Aib³⁵,Lys²⁶(N^{ε}-tetradecanoyl),Arg³⁴)hGLP-1(7-36)NH₂; | (SEQ ID NO.84) |
| (Gly⁸,Aib³⁵,Lys²⁶(N^{ε}-hexadecanoyl),Arg³⁴)hGLP-1(7-36)NH₂; | (SEQ ID NO.85) |
| (Gly⁸,Aib³⁵,Lys²⁶(N^{ε}-decanoyl),Arg³⁴)hGLP-1(7-36)NH₂; | (SEQ ID NO.86) |
| (Gly⁸,Aib³⁵,Lys²⁵,Lys²⁶(N^{ε}-octanoyl),Arg³⁴)hGLP-1(7-36)NH₂; | (SEQ ID NO.87) |
| (Gly⁸,Aib³⁵,Lys²⁵,Lys²⁶(N^{ε}-tetradecanoyl), | (SEQ ID NO.88) |
| Arg³⁴)hGLP-1(7-36)NH₂; | |
| (Gly⁸,Aib³⁵,Lys²⁵,Lys²⁶(N^{ε}-hexadecanoyl), | (SEQ ID NO.89) |
| Arg³⁴)hGLP-1(7-36)NH₂; | |
| (Gly⁸,Aib³⁵,Arg^{25,34},Lys²⁶(N^{ε}-octanoyl))hGLP-1(7-36)NH₂; | (SEQ ID NO.90) |
| (Gly⁸,Aib³⁵,Arg^{25,34},Lys²⁶(N^{ε}-tetradecanoyl))hGLP-1(7-36)NH₂; | (SEQ ID NO.91) |
| (Gly⁸,Aib³⁵,Arg^{25,34},Lys²⁶(N^{ε}-hexadecanoyl))hGLP-1(7-36)NH₂; | (SEQ ID NO.92) |
| (Gly⁸,Aib³⁵,Arg^{25,34},Lys²⁶(N^{ε}-decanoyl))hGLP-1(7-36)NH₂; | (SEQ ID NO.93) |
| (Gly⁸,Lys²⁶(N^{ε}-octanoyl),Arg³⁴,β-Ala³⁵)hGLP-1(7-36)NH₂; | (SEQ ID NO.94) |
| (Gly⁸,Lys²⁶(N^{ε}-tetradecanoyl),Arg³⁴,β-Ala³⁵)hGLP-1(7-36)NH₂; | (SEQ ID NO.95) |
| (Gly⁸,Lys²⁶(N^{ε}-hexadecanoyl),Arg³⁴,β-Ala³⁵)hGLP-1(7-36)NH₂; | (SEQ ID NO.96) |
| (Gly⁸,Lys²⁶(N^{ε}-decanoyl),Arg³⁴,β-Ala³⁵)hGLP-1(7-36)NH₂; | (SEQ ID NO.97) |
| (Gly⁸,Aib³⁵,Lys³⁴(N^{ε}-octanoyl))hGLP-1(7-36)NH₂; | (SEQ ID NO.98) |
| (Gly⁸,Aib³⁵,Lys³⁴(N^{ε}-tetradecanoyl))hGLP-1(7-36)NH₂; | (SEQ ID NO.99) |
| (Gly⁸,Aib³⁵,Lys³⁴(N^{ε}-hexadecanoyl))hGLP-1(7-36)NH₂; | (SEQ ID NO.100) |
| (Gly⁸,Aib³⁵,Arg²⁶,Lys³⁴(N^{ε}-octanoyl))hGLP-1(7-36)NH₂; | (SEQ ID NO.101) |
| (Gly⁸,Aib³⁵,Arg²⁶,Lys³⁴(N^{ε}-hexadecanoyl))hGLP-1(7-36)NH₂; | (SEQ ID NO.102) |
| (Gly⁸,Aib³⁵,Arg²⁶,Lys³⁴(N^{ε}-decanoyl))hGLP-1(7-36)NH₂; | (SEQ ID NO.103) |
| (Gly⁸,Aib³⁵,Arg^{25,26},Lys³⁴(N^{ε}-octanoyl))hGLP-1(7-36)NH₂; | (SEQ ID NO.104) |
| (Gly⁸,Aib³⁵,Arg^{25,26},Lys³⁴(N^{ε}-tetradecanoyl))hGLP-1(7-36)NH₂; | (SEQ ID NO.105) |
| (Gly⁸,Aib³⁵,Arg^{25,26},Lys³⁴(N^{ε}-hexadecanoyl))hGLP-1(7-36)NH₂; | (SEQ ID NO.106) |
| (Gly⁸,Aib³⁵,Arg^{25,26},Lys³⁴(N^{ε}-decanoyl))hGLP-1(7-36)NH₂; | (SEQ ID NO.107) |
| (Gly⁸,Aib³⁵,Lys²⁵,Arg²⁶,Lys³⁴(N^{ε}-octanoyl))hGLP-1(7-36)NH₂; | (SEQ ID NO.108) |
| (Gly⁸,Aib³⁵,Lys²⁵,Arg²⁶,Lys³⁴(N^{ε}- | (SEQ ID NO.109) |
| tetradecanoyl))hGLP-1(7-36)NH₂; | |
| (Gly⁸,Aib³⁵,Lys²⁵,Arg²⁶,Lys³⁴(N^{ε}- | (SEQ ID NO.110) |
| hexadecanoyl))hGLP-1(7-36)NH₂; | |
| (Gly⁸,Aib³⁵,Lys³⁶(N^{ε}-octanoyl))hGLP-1(7-36)NH₂; | (SEQ ID NO.111) |
| (Gly⁸,Aib³⁵,Lys³⁶(N^{ε}-tetradecanoyl))hGLP-1(7-36)NH₂; | (SEQ ID NO.112) |
| (Gly⁸,Aib³⁵,Lys³⁶(N^{ε}-hexadecanoyl))hGLP-1(7-36)NH₂; | (SEQ ID NO.113) |
| (Gly⁸,Aib³⁵,Arg²⁶,Lys³⁶(N^{ε}-octanoyl))hGLP-1(7-36)NH₂; | (SEQ ID NO.114) |
| (Gly⁸,Aib³⁵,Arg²⁶,Lys³⁶(N^{ε}-tetradecanoyl))hGLP-1(7-36)NH₂; | (SEQ ID NO.115) |
| (Gly⁸,Aib³⁵,Arg²⁶,Lys³⁶(N^{ε}-hexadecanoyl))hGLP-1(7-36)NH₂; | (SEQ ID NO.116) |
| (Gly⁸,Aib³⁵,Arg^{26,34},Lys³⁶(N^{ε}-octanoyl))hGLP-1(7-36)NH₂; | (SEQ ID NO.117) |
| (Gly⁸,Aib³⁵,Arg^{26,34},Lys³⁶(N^{ε}-hexadecanoyl))hGLP-1(7-36)NH₂; | (SEQ ID NO.118) |
| (Gly⁸,Aib³⁵,Arg^{26,34},Lys³⁸(N^{ε}-octanoyl))hGLP-1(7-38)NH₂; | (SEQ ID NO.119) |
| (Gly⁸,Aib³⁵,Arg^{26,34},Lys³⁸(N^{ε}-decanoyl))hGLP-1(7-38)NH₂; | (SEQ ID NO.120) |
| (Gly⁸,Aib³⁵,Arg^{26,34},Lys³⁸(N^{ε}-tetradecanoyl))hGLP-1(7-38)NH₂; | (SEQ ID NO.121) |
| (Gly⁸,Aib³⁵,Arg^{26,34},Lys³⁸(N^{ε}-hexadecanoyl))hGLP-1(7-38)NH₂; | (SEQ ID NO.122) |
| (Gly⁸,Aib^{35,37},Arg^{25,26,34},Lys³⁸(N^{ε}-octanoyl))hGLP-1(7-38)NH₂; | (SEQ ID NO.123) |
| (Gly⁸,Aib^{35,37},Arg^{25,26,34},Lys³⁸(N^{ε}-decanoyl))hGLP-1(7-38)NH₂; | (SEQ ID NO.124) |
| (Gly⁸,Aib^{35,37},Arg^{25,26,34},Lys³⁸(N^{ε}- | (SEQ ID NO.125) |
| tetradecanoyl))hGLP-1(7-38)NH₂; | |
| (Gly⁸,Aib^{35,37},Arg^{25,26,34},Lys³⁸(N^{ε}- | (SEQ ID NO.126) |
| hexadecanoyl))hGLP-1(7-38)NH₂; | |
| (Gly⁸,Aib^{35,37},Arg^{26,34},Lys³⁸(N^{ε}-octanoyl))hGLP-1(7-38)NH₂; | (SEQ ID NO.127) |
| (Gly⁸,Aib^{35,37},Arg^{26,34},Lys³⁸(N^{ε}-decanoyl))hGLP-1(7-38)NH₂; | (SEQ ID NO.128) |
| (Gly⁸,Aib^{35,37},Arg^{26,34},Lys³⁸(N^{ε}-hexadecanoyl))hGLP-1(7-38)NH₂; | (SEQ ID NO.129) |
| (Gly⁸,Aib³⁵,Lys²⁵,Arg^{26,34},Lys³⁶(N^{ε}-octanoyl))hGLP-1(7-36)NH₂; | (SEQ ID NO.130) |
| (Gly⁸,Aib³⁵,Lys²⁶,Arg^{26,34},Lys³⁶(N^{ε}- | (SEQ ID NO.131) |
| tetradecanoyl))hGLP-1(7-36)NH₂; | |
| (Gly⁸,Aib³⁵,Lys²⁵,Arg^{26,34},Lys³⁶(N^{ε}- | (SEQ ID NO.132) |
| hexadecanoyl))hGLP-1(7-36)NH₂; | |
| (Gly⁸,Aib³⁵,Arg^{25,26,34},Lys³⁶(N^{ε}-octanoyl))hGLP-1(7-36)NH₂; | (SEQ ID NO.133) |
| (Gly⁸,Aib³⁵,Arg^{25,26,34},Lys³⁶(N^{ε}-tetradecanoyl))hGLP-1(7-36)NH₂; | (SEQ ID NO.134) |
| (Gly⁸,Aib³⁵,Arg^{25,26,34},Lys³⁶(N^{ε}-hexadecanoyl))hGLP-1(7-36)NH₂; | (SEQ ID NO.135) |
| (Gly⁸,Aib³⁵,Arg^{25,26,34},Lys³⁶(N^{ε}-decanoyl))hGLP-1(7-36)NH₂; | (SEQ ID NO.136) |
| (Gly⁸,Lys³⁴(N^{ε}-octanoyl),β-Ala³⁵)hGLP-1(7-36)NH₂; | (SEQ ID NO.137) |
| (Gly⁸,Lys³⁴(N^{ε}-tetradecanoyl),β-Ala³⁵)hGLP-1(7-36)NH₂; | (SEQ ID NO.138) |
| (Gly⁸,Lys³⁴(N^{ε}-hexadecanoyt),β-Ala³⁵)hGLP-1(7-36)NH₂; | (SEQ ID NO.139) |
| (Gly⁸,A6c³²,Lys³⁴(N^{e}octanoyl),β-Ala³⁵)hGLP-1(7-36)NH₂; | (SEQ ID NO.140) |
| (Gly⁸,Glu²³,Lys³⁴(N^{e}octanoyl),β-Ala³⁵)hGLP-1(7-36)NH₂; | (SEQ ID NO.141) |
| (Gly⁸,Glu²³,A6c³²,Lys³⁴(N^{e}octanoyl),β-Ala³⁵)hGLP-1(7-36)NH₂; | (SEQ ID NO.142) |
| (Gly⁸,Arg²⁶,Lys³⁴(N^{ε}-octanoyl),β-Ala³⁵)hGLP-1(7-36)NH₂; | (SEQ ID NO.143) |
| (Gly⁸,Arg²⁶,Lys³⁴(N^{ε}-tetradecanoyl),β-Ala³⁵)hGLP-1(7-36)NH₂; | (SEQ ID NO.144) |
| (Gly⁸,Arg²⁶,Lys³⁴(N^{ε}-hexadecanoyl),β-Ala³⁵)hGLP-1(7-36)NH₂; | (SEQ ID NO.145) |
| (Gly⁸,Arg²⁶,Lys³⁴(N^{ε}-decanoyl),β-Ala³⁵)hGLP-1(7-36)NH₂; | (SEQ ID NO.146) |
| (Gly⁸,Arg^{25,26},Lys³⁴(N^{ε}-octanoyl),β-Ala³⁵)hGLP-1(7-36)NH₂; | (SEQ ID NO.147) |
| (Gly⁸,Arg^{25,26},Lys³⁴(N^{ε}-tetradecanoyl),β-Ala³⁵)hGLP-1(7-36)NH₂; | (SEQ ID NO.148) |
| (Gly⁸,Arg^{25,26},Lys³⁴(N^{ε}-hexadecanoyl),β-Ala³⁵)hGLP-1(7-36)NH₂; | (SEQ ID NO.149) |
| (Gly⁸,Arg^{25,26},Lys³⁴(N^{ε}-decanoyl),β-Ala³⁵)hGLP-1(7-36)NH₂; | (SEQ ID NO.150) |
| (Gly⁸,Lys²⁵,Arg²⁶,Lys³⁴(N^{ε}-octanoyl),β-Ala³⁵)hGLP-1(7-36)NH₂; | (SEQ ID NO.151) |
| (Gly⁸,Lys²⁵,Arg²⁶,Lys³⁴(N^{ε}-tetradecanoyl),β- | (SEQ ID NO.152) |
| Ala³⁵)hGLP-1(7-36)NH₂; | |
| (Gly⁸,Lys²⁵,Arg²⁶,Lys³⁴(N^{ε}-hexadecanoyl),β- | (SEQ ID NO.153) |
| Ala³⁵)hGLP-1(7-36)NH₂; | |
| (Gly⁸,β-Ala³⁵,Lys³⁶(N^{ε}-octanoyl))hGLP-1(7-36)NH₂; | (SEQ ID NO.154) |
| (Gly⁸,β-Ala³⁵,Lys³⁶(N^{ε}-tetradecanoyl))hGLP-1(7-36)NH₂; | (SEQ ID NO.155) |
| (Gly⁸,β-Ala³⁵,Lys³⁶(N^{ε}-hexadecanoyl))hGLP-1(7-36)NH₂; | (SEQ ID NO.156) |
| (Gly⁸,Arg²⁶,β-Ala³⁵,Lys³⁶(N^{ε}-octanoyl))hGLP-1(7-36)NH₂; | (SEQ ID NO.157) |
| (Gly⁸,Arg²⁶,β-Ala³⁵,Lys³⁶(N^{ε}-tetradecanoyl))hGLP-1(7-36)NH₂; | (SEQ ID NO.158) |
| (Gly⁸,Arg²⁶,β-Ala³⁵,Lys³⁶(N^{ε}-hexadecanoyl))hGLP-1(7-36)NH₂; | (SEQ ID NO.159) |
| (Gly⁸,Arg^{26,34},β-Ala³⁵,Lys³⁶(N^{ε}-octanoyl))hGLP-1(7-36)NH₂; | (SEQ ID NO.160) |
| (Gly⁸,Arg^{26,34},β-Ala³⁵,Lys³⁶(N^{ε}-tetradecanoyl))hGLP-1(7-36)NH₂; | (SEQ ID NO.161) |
| (Gly⁸,Arg^{26,34},β-Ala³⁵,Lys³⁵(N^{ε}-hexadecanoyl))hGLP-1(7-36)NH₂; | (SEQ ID NO.162) |
| (Gly⁸,Arg^{26,34},β-Ala³⁵,Lys³⁶(N^{ε}-decanoyl))hGLP-1(7-36)NH₂; | (SEQ ID NO.163) |
| (Gly⁸,Lys²⁵,Arg^{26,34},β-Ala³⁵,Lys³⁶(N^{ε}- | (SEQ ID NO.164) |
| octanoyl))hGLP-1(7-36)NH₂; | |
| (Gly⁸,Lys²⁵,Arg^{26,34},Lys³⁶(N^{ε}-tetradecanoyl),β | (SEQ ID NO.165) |
| Ala³⁵)hGLP-1(7-36)NH₂; | |
| (Gly⁸,Lys²⁵,Arg^{26,34},β-Ala³⁵,Lys³⁶(N^{ε}- | (SEQ ID NO.166) |
| hexadecanoyl))hGLP-1(7-36)NH₂; | |
| (Gly⁸,Arg^{25,26,34},β-Ala³⁵,Lys³⁶(N^{ε}-octanoyl))hGLP-1(7-36)NH₂; | (SEQ ID NO.167) |
| (Gly⁸,Arg^{25,26,34},β-Ala³⁵,Lys³⁶(N^{ε}- | (SEQ ID NO.168) |
| tetradecanoyl))hGLP-1(7-36)NH₂; | |
| (Gly⁸,Arg^{25,26,34},β-Ala³⁵,Lys³⁶(N^{ε}- | (SEQ ID NO.169) |
| hexadecanoyl))hGLP-1(7-36)NH₂; | |
| (Gly⁸,Arg^{25,26,34},β-Ala³⁵,Lys³⁶(N^{ε}-decanoyl))hGLP-1(7-36)NH₂; | (SEQ ID NO.170) |
| (Gly⁸,Aib³⁵,Lys²⁶(N^{ε}-octanoyl),A6c³²,Arg³⁴)hGLP-1(7-36)NH₂; | (SEQ ID NO.171) |
| (Gly⁸,Aib³⁵,Lys²⁶(N^{ε}-tetradecanoyl),A6c³², | (SEQ ID NO.172) |
| Arg³⁴)hGLP-1(7-36)NH₂; | |
| (Gly⁸,Aib³⁵,Lys²⁶(N^{ε}-hexadecanoyl),A6c³²,Arg³⁴)hGLP-1(7-36)NH₂; | (SEQ ID NO.173) |
| (Gly⁸,Aib³⁵,A6c³²,Lys³⁴(N^{ε}-octanoyl))hGLP-1(7-36)NH₂; | (SEQ ID NO.174) |
| (Gly⁸,Aib³⁵,A6c³²,Lys³⁴(N^{ε}-tetradecanoyl))hGLP-1(7-36)NH₂; | (SEQ ID NO.175) |
| (Gly⁸,Aib³⁵,A6c³²,Lys³⁴(N^{ε}-hexadecanoyl))hGLP-1(7-36)NH₂; | (SEQ ID NO.176) |
| (Gly⁸,Aib³⁵,Arg²⁶,A6c³²,Lys³⁴(N^{ε}-octanoyl))hGLP-1(7-36)NH₂; | (SEQ ID NO.177) |
| (Gly⁸,Aib³⁵,Arg²⁶,A6c³²,Lys³⁴(N^{ε}- | (SEQ ID NO.178) |
| tetradecanoyl))hGLP-1(7-36)NH₂; | |
| (Gly⁸,Aib³⁵,A6c³²,Lys³⁶(N^{ε}-octanoyl))hGLP-1(7-36)NH₂; | (SEQ ID NO.179) |
| (Gly⁸,Aib³⁵,A6c³²,Lys³⁶(N^{ε}-tetradecanoyl))hGLP-1(7-36)NH₂; | (SEQ ID NO.180) |
| (Gly⁸,Aib³⁵,A6c³²,Lys³⁶(N^{ε}-hexadecanoyl))hGLP-1(7-36)NH₂; | (SEQ ID NO.181) |
| (Gly⁸,Aib³⁵,Arg²⁶,A6c³²,Lys³⁶(N^{ε}-octanoyl))hGLP-1(7-36)NH₂; | (SEQ ID NO.182) |
| (Gly⁸,Aib³⁵,Arg²⁶,A6c³²,Lys³⁶(N^{ε}- | (SEQ ID NO.183) |
| tetradecanoyl))hGLP-1(7-36)NH₂; | |
| (Gly⁸,Aib³⁵,Arg²⁶,A6c³²,Lys³⁶(N^{ε}- | (SEQ ID NO.184) |
| hexadecanoyl))hGLP-1(7-36)NH₂; | |
| (Gly⁸,Aib³⁵,Arg^{26,34},A6c³²,Lys³⁶(N^{ε}-octanoyl))hGLP-1(7-36)NH₂; | (SEQ ID NO.185) |
| (Gly⁸,Aib³⁵,Arg^{26,34},A6c³²,Lys³⁶(N^{ε}-decanoyl))hGLP-1(7-36)NH₂; | (SEQ ID NO.186) |
| (Gly⁸,Aib³⁵,Arg^{26,34},A6c³²,Lys³⁶(N^{ε}- | (SEQ ID NO.187) |
| tetradecanoyl))hGLP-1(7-36)NH₂; | |
| (Gly⁸,Aib³⁵,Arg^{26,34},A6c³²,Lys³⁶(N^{ε}- | (SEQ ID NO.188) |
| hexadecanoyl))hGLP-1(7-36)NH₂; | |
| (Gly⁸,Aib^{24,35},Lys²⁶(N^{ε}-octanoyl),Arg³⁴)hGLP-1(7-36)NH₂; | (SEQ ID NO.189) |
| (Gly⁸,Aib^{24,35},Lys²⁶(N^{ε}-tetradecanoyl),Arg³⁴)hGLP-1(7-36)NH₂; | (SEQ ID NO.190) |
| (Gly⁸,Aib^{24,35},Lys²⁶(N^{ε}-hexadecanoyl),Arg³⁴)hGLP-1(7-36)NH₂; | (SEQ ID NO.191) |
| (Gly⁸,Aib^{24,35},Arg²⁶,Lys³⁴(N^{ε}-octanoyl))hGLP-1(7-36)NH₂; | (SEQ ID NO.192) |
| (Gly⁸,Aib^{24,35},Arg²⁶,Lys³⁴(N^{ε}-tetradecanoyl))hGLP-1(7-36)NH₂; | (SEQ ID NO.193) |
| (Gly⁸,Aib^{24,35},Arg²⁶,Lys³⁴(N^{ε}-hexadecanoyl))hGLP-1(7-36)NH₂; | (SEQ ID NO.194) |
| (Gly⁸,Aib^{24,35},Arg^{26,34},Lys³⁶(N^{ε}-octanoyl))hGLP-1(7-36)NH₂; | (SEQ ID NO.195) |
| (Gly⁸,Aib^{24,35},Arg^{26,34},Lys³⁶(N^{ε}-tetradecanoyl))hGLP-1(7-36)NH₂; | (SEQ ID NO.196) |
| (Gly⁸,Aib^{24,35},Arg^{26,34},Lys³⁶(N^{ε}-hexadecanoyl))hGLP-1(7-36)NH₂; | (SEQ ID NO.197) |
| (Gly⁸,Aib^{24,35},Glu²³,A6c³²,Lys³⁴(N^{e}octanoyl))hGLP-1(7-36)NH₂; | (SEQ ID NO.198) |
| (Gly⁸,Aib³⁵,Glu²³,Lys²⁶(N^{ε}-octanoyl),Arg³⁴)hGLP-1(7-36)NH₂; | (SEQ ID NO.199) |
| (Gly⁸,Aib³⁵,Glu²³,Lys²⁶(N^{ε}-tetradecanoyl), | (SEQ ID NO.200) |
| Arg³⁴)hGLP-1(7-36)NH₂; | |
| (Gly⁸,Aib³⁵,Glu²³,Lys²⁶(N^{ε}-hexadecanoyl), | (SEQ ID NO.201) |
| Arg³⁴)hGLP-1(7-36)NH₂; | |
| (Gly⁸,Aib³⁵,Glu²³,Lys³⁴(N^{e}octanoyl))hGLp-1(7-36)NH₂; | (SEQ ID NO.202) |
| (Gly⁸,Aib³⁵,Glu²³,A6c³²,Lys³⁴(N^{e}octanoyl))hGLP-1(7-36)NH₂; | (SEQ ID NO.203) |
| (Gly⁸,Aib³⁵,Glu²³,Arg²⁶,Lys³⁴(N^{ε}-octanoyl))hGLP-1(7-36)NH₂; | (SEQ ID NO.204) |
| (Gly⁸,Aib³⁵,Glu²³,Arg²⁶,Lys³⁴(N^{ε}- | (SEQ ID NO.205) |
| tetradecanoyl))hGLP-1(7-36)NH₂; | |
| (Gly⁸,Aib³⁵,Glu²³,Arg²⁶,Lys³⁴(N^{ε}- | (SEQ ID NO.206) |
| hexadecanoyl))hGLP-1(7-36)NH₂; | |
| (Gly⁸,Aib³⁵,Glu²³,Lys³⁶(N^{ε}-octanoyl))hGLP-1(7-36)NH₂; | (SEQ ID NO.207) |
| (Gly⁸,Aib³⁵,Glu²³,Lys³⁶(N^{ε}-tetradecanoyl))hGLP-1(7-36)NH₂; | (SEQ ID NO.208) |
| (Gly⁸,Aib³⁵,Glu²³,Lys³⁶(N^{ε}-hexadecanoyl))hGLP-1(7-36)NH₂; | (SEQ ID NO.209) |
| (Gly⁸,Aib³⁵,Glu²³,Arg^{26,34},Lys³⁶(N^{ε}-octanoyl))hGLP-1(7-36)NH₂; | (SEQ ID NO.210) |
| (Gly⁸,Aib³⁵,Glu²³,Arg^{26,34},Lys³⁶(N^{ε}- | (SEQ ID NO.211) |
| tetradecanoyl))hGLP-1(7-36)NH₂; | |
| (Gly⁸,Aib³⁵,Glu²³,Arg^{26,34},Lys³⁶(N^{ε}- | (SEQ ID NO.212) |
| hexadecanoyl))hGLP-1(7-36)NH₂; | |
| (Gly⁸,Aib^{30,35},Lys²⁶(N^{ε}-octanoyl),Arg³⁴)hGLP-1(7-36)NH₂; | (SEQ ID NO.213) |
| (Gly⁸,Aib^{30,35},Lys²⁶(N^{ε}-tetradecanoyl),Arg³⁴)hGLP-1(7-36)NH₂; | (SEQ ID NO.214) |
| (Gly⁸,Aib^{30,35},Lys²⁶(N^{ε}-hexadecanoyl),Arg³⁴)hGLP-1(7-36)NH₂; | (SEQ ID NO.215) |
| (Gly⁸,Aib^{30,35},Arg²⁶,Lys³⁴(N^{ε}-octanoyl))hGLP-1(7-36)NH₂; | (SEQ ID NO.216) |
| (Gly⁸,Aib^{30,35},Arg²⁶,Lys³⁴(N^{ε}-tetradecanoyl))hGLP-1(7-36)NH₂; | (SEQ ID NO.217) |
| (Gly⁸,Aib^{30,35},Arg²⁶,Lys³⁴(N^{ε}-hexadecanoyl))hGLP-1(7-36)NH₂; | (SEQ ID NO.218) |
| (Gly⁸,Aib^{30,35},Arg^{26,34},Lys³⁶(N^{ε}-octanoyl))hGLP-1(7-36)NH₂; | (SEQ ID NO.219) |
| (Gly⁸,Aib^{30,35},Arg^{26,34},Lys³⁶(N^{ε}-tetradecanoyl))hGLP-1(7-36)NH₂; | (SEQ ID NO.220) |
| (Gly⁸,Aib^{30,35},Arg^{26,34},Lys³⁶(N^{ε}-hexadecanoyl))hGLP-1(7-3a)NH₂; | (SEQ ID NO.221) |
| (Gly⁸,Aib³⁵,Glu²³,A6c³²,Lys³⁶(N^{ε}-octanoyl))hGLP-1(7-36)NH₂; | (SEQ ID NO.222) |
| (Gly⁸,Aib³⁵,Glu²³,A6c³²,Lys³⁶(N^{ε}- | (SEQ ID NO.223) |
| tetradecanoyl))hGLP-1(7-36)NH₂; | |
| (Gly⁸,Aib³⁵,Glu²³,A6c³²,Lys³⁶(N^{ε}- | (SEQ ID NO.224) |
| hexadecanoyl)hGLP-1(7-36)NH₂; | |
| (Gly⁸,Aib³⁵,Glu²³,Arg^{26,34},A6c³²,Lys³⁶(N^{ε}- | (SEQ ID NO.225) |
| octanoyl))hGLP-1(7-36)NH₂; | |
| (Gly⁸,Aib³⁵,Glu²³,Arg^{26,34},A6c³²,Lys³⁶(N^{ε}- | (SEQ ID NO.226) |
| tetradecanoyl))hGLP-1(7-36)NH₂; | |
| (Gly⁸,Aib³⁵,Glu²³,Arg^{26,34},A6c³²,Lys³⁶(N^{ε}- | (SEQ ID NO.227) |
| hexadecanoyl))hGLP-1(7-36)NH₂; | |
| (Gly⁸,Aib^{24,35},Glu²³,Arg^{26,34},A6c³²,Lys³⁶(N^{ε}- | (SEQ ID NO.228) |
| octanoyl))hGLP-1(7-36)NH₂; | |
| (Gly⁸,Aib^{24,35},Glu²³,Arg^{26,34},A6c³²,Lys³⁶(N^{ε}- | (SEQ ID NO.229) |
| tetradecanoyl))hGLP-1(7-36)NH₂; | |
| (Gly⁸,Aib^{24,35},Glu²³,Arg^{26,34},A6c³²,Lys³⁶(N^{ε}- | (SEQ ID NO.230) |
| hexadecanoyl))hGLP-1(7-36)NH₂; | |
| (Gly⁸,Aib^{24,30,35},Glu²³,Arg^{26,34},A6c³²,Lys³⁶(N^{ε}- | (SEQ ID NO.231) |
| octanoyl))hGLP-1(7-36)NH₂; | |
| (Gly⁸,Aib^{24,30,35},Glu²³,Arg^{26,34},A6c³²,Lys³⁵(N^{ε}- | (SEQ ID NO.232) |
| tetradecanoyl))hGLP-1(7-36)NH₂; | |
| (Gly⁸,Aib^{24,30,35},Glu²³,Arg^{26,34},A6c³²,Lys³⁶(N^{ε}- | (SEQ ID NO.233) |
| hexadecanoyl))hGLP-1(7-36)NH₂; | |
| ((N^{α}-HEPES-His)⁷,Gly⁸,β-Ala³⁵)hGLP-1(7-36)NH₂; | (SEQ ID NO.234) |
| ((N^{α}-HEPA-His)⁷,Gly⁸,β-Ala³⁵)hGLP-1(7-36)NH₂; | (SEQ ID NO.235) |
| ((N^{α}-tetradecanoyl-His)⁷,Gly⁸,Aib³⁵)hGLP-1(7-36)NH₂; | (SEQ ID NO.236) |
| ((N^{α}-tetradecanoyl-His)⁷,Gly⁸,β-Ala³⁵)hGLP-1(7-36)NH₂; | (SEQ ID NO.237) |
| ((N^{α}-tetradecanoyl-His)⁷,Gly⁸,Aib³⁵,Arg^{26,34})hGLP-1(7-36)NH₂; | (SEQ ID NO.238) |
| ((N^{α}-tetradecanoyl-His)⁷,Gly⁸,Arg^{26,34},β-Ala³⁵)hGLP-1(7-36)NH₂; | (SEQ ID NO.239) |
| ((N^{α}-tetradecanoyl-His)⁷,Gly⁸,Aib³⁵,Arg^{25,26,34})hGLP-1(7-36)NH₂; | (SEQ ID NO.240) |
| ((N^{α}-tetradecanoyl-His)⁷,Gly⁸,Arg^{25,26,34},β- | (SEQ ID NO.241) |
| Ala³⁵)hGLP-1(7-36)NH₂; | |
| (Gly⁸,Aib³⁵,Lys²⁶(N^{ε}-octanesulfonyl),Arg³⁴)hGLP-1(7-36)NH₂; | (SEQ ID NO.242) |
| (Gly⁸,Aib³⁵,Lys²⁶(N^{ε}-dodecanesulfonyl),Arg³⁴)hGLP-1(7-36)NH₂; | (SEQ ID NO.243) |
| (Gly⁸,Aib³⁵,Lys²⁶(N^{ε}-hexadecanesulfonyl), | (SEQ ID NO.244) |
| Arg³⁴)hGLP-1(7-36)NH₂; | |
| (Gly⁸,Aib³⁵,Arg²⁶,Lys³⁴(N^{ε}-octanesulfonyl))hGLP-1(7-36)NH₂; | (SEQ ID NO.245) |
| (Gly⁸,Aib³⁵,Arg²⁶,Lys³⁴(N^{ε}-dodecanesulfonyl))hGLP-1(7-36)NH₂; | (SEQ ID NO.246) |
| (Gly⁸,Aib³⁵,Arg²⁶,Lys³⁴(N^{ε}-hexadecanesulfonyl)) | (SEQ ID NO.247) |
| hGLP-1(7-36)NH₂; | |
| (Gly⁸,Aib³⁵,Arg^{26,34},Lys³⁶(N^{ε}-octanesulfonyl))hGLP-1(7-36)NH₂; | (SEQ ID NO.248) |
| (Gly⁸,Aib³⁵,Arg^{26,34},Lys³⁶(N^{ε}- | (SEQ ID NO.249) |
| hexadecanesulfonyl))hGLP-1(7-36)NH₂; | |
| (Gly⁸,Aib³⁵,Asp²⁶(1-(4-decylpiperazine)),Arg³⁴)hGLP-1(7-36)NH₂; | (SEQ ID NO.250) |
| (Gly⁸,Aib³⁵,Asp²⁶(1-(4-dodecylpiperazine)), | (SEQ ID NO.251) |
| Arg³⁴)hGLP-1(7-36)NH₂; | |
| (Gly⁸,Aib³⁵,Asp²⁶(1 -(4-tetradecylpiperazine)), | (SEQ ID NO.252) |
| Arg³⁴)hGLP-1(7-36)NH₂; | |
| (Gly⁸,Aib³⁵,Asp²⁶(1 -(4-hexadecylpiperazine)), | (SEQ ID NO.253) |
| Arg³⁴)hGLP-1(7-36)NH₂; | |
| (Gly⁸,Aib³⁵,Arg²⁶,Asp³⁴(1-(4-decylpiperazine)))hGLP-1(7-36)NH₂; | (SEQ ID NO.254) |
| (Gly⁸,Aib³⁵,Arg²⁶,Asp³⁴(1-(4- | (SEQ ID NO.255) |
| dodecylpiperazine)))hGLP-1(7-36)NH₂; | |
| (Gly⁸,Aib³⁵,Arg²⁶1,Asp³⁴(1-(4- | (SEQ ID NO.256) |
| tetradecylpiperazine)))hGLP-1(7-36)NH₂; | |
| (Gly⁸,Aib³⁵,Arg²⁶,Asp³⁴(1-(4- | (SEQ ID NO.257) |
| hexadecylpiperazine)))hGLP-1(7-36)NH₂; | |
| (Gly⁸,Aib³⁵,Arg^{26,34},Asp³⁶(1-(4- | (SEQ ID NO.258) |
| decylpiperazine)))hGLP-1(7-36)NH₂; | |
| (Gly⁸,Aib³⁵,Arg^{26,34},Asp³⁶(1-(4- | (SEQ ID NO.259) |
| doclecylpiperazine)))hGLP-1(7-36)NH₂; | |
| (Gly⁸,Aib³⁵,Arg^{26,34},Asp³⁶(1-(4- | (SEQ ID NO.260) |
| hexadecylpiperazine)))hGLP-1(7-36)NH₂; | |
| (Gly⁸,Aib³⁵,Arg^{26,34},Asp³⁸(1-(4- | (SEQ ID NO.261) |
| decylpiperazine)))hGLP-1(7-38)NH₂; | |
| (Gly⁸,Aib³⁵,Arg^{26,34},Asp³⁸(1-(4- | (SEQ ID NO.262) |
| dodecylpiperazine)))hGLP-1(7-38)NH₂; | |
| (Gly⁸,Aib³⁵,Arg^{26,34},Asp³⁸(1-(4- | (SEQ ID NO.263) |
| tetradecylpiperazine)))hGLP-1(7-38)NH₂; | |
| (Gly⁸,Aib³⁵,Arg^{26,34},Asp³⁸(1-(4- | (SEQ ID NO.264) |
| hexadecylpiperazine)))hGLP-1(7-38)NH₂; | |
| (Gly⁸,Aib^{35,37},Arg^{26,34},Asp³⁸(1-(4- | (SEQ ID NO.265) |
| decylpiperazine)))hGLP-1(7-38)NH₂; | |
| (Gly⁸,Aib^{35,37},37,Arg^{26,34},Asp³⁸(1-(4- | (SEQ ID NO.266) |
| dodecylpiperazine)))hGLP-1(7-38)NH₂; | |
| (Gly⁸,Aib^{35,37},Arg^{26,34},Asp³⁸(1-(4- | (SEQ ID NO.267) |
| tetradecylpiperazine)))hGLP-1(7-38)NH₂; | |
| (Gly⁸,Aib^{35,37},Arg^{26,34},Asp³⁸(1-(4- | (SEQ ID NO.268) |
| hexadecylpiperazine)))hGLP-1(7-38)NH₂; | |
| (Gly⁸,Aib³⁵,Arg^{25,34},Asp²⁶(1-(4- | (SEQ ID NO.269) |
| decylpiperazine)))hGLP-1(7-36)NH₂; | |
| (Gly⁸,Aib³⁵,Arg^{25,34},Asp²⁶(1-(4- | (SEQ ID NO.270) |
| dodecylpiperazine)))hGLP-1(7-36)NH₂; | |
| (Gly⁸,Aib³⁵,Arg^{25,34},Asp²⁶(1-(4- | (SEQ ID NO.271) |
| tetradecylpiperazine)))hGLP-1(7-36)NH₂; | |
| (Gly⁸,Aib³⁵,Arg^{25,34},Asp²⁶(1-(4- | (SEQ ID NO.272) |
| hexadecylpiperazine)))hGLP-1(7-36)NH₂; | |
| (Gly⁸,Aib³⁵,Arg^{25,26},Asp³⁴(1-(4- | (SEQ ID NO.273) |
| decylpiperazine)))hGLP-1(7-36)NH₂; | |
| (Gly⁸,Aib³⁵,Arg^{25,26},Asp³⁴(1-(4- | (SEQ ID NO.274) |
| dodecylpiperazine)))hGLP-1(7-36)NH₂; | |
| (Gly⁸,Aib³⁵,Arg^{25,26},Asp³⁴(1-(4- | (SEQ ID NO.275) |
| tetradecylpiperazine)))hGLP-1(7-36)NH₂; | |
| (Gly⁸,Aib³⁵,Arg^{25,26},Asp³⁴(1-(4- | (SEQ ID NO.276) |
| hexadecylpiperazine)))hGLP-1(7-36)NH₂; | |
| (Gly⁸,Aib³⁵,Arg^{25,26,34},Asp³⁶(1-(4- | (SEQ ID NO.277) |
| decylpiperazine)))hGLP-1(7-36)NH₂; | |
| (Gly⁸,Aib³⁵,Arg^{25,26,34},Asp³⁶(1-(4- | (SEQ ID NO.278) |
| dodecylpiperazine)))hGLP-1(7-36)NH₂; | |
| (Gly⁸,Aib³⁵,Arg^{25,26,34},Asp³⁶(1-(4- | (SEQ ID NO.279) |
| tetradecylpiperazine)))hGLP-1(7-36)NH₂; | |
| (Gly⁸,Aib³⁵,Arg^{25,26,34},Asp³⁶(1-(4- | (SEQ ID NO.280) |
| hexadecylpiperazine)))hGLP-1(7-36)NH₂; | |
| (Gly⁸,Aib³⁵,Arg^{25,26,34},Asp³⁸(1-(4- | (SEQ ID NO.281) |
| decylpiperazine)))hGLP-1(7-38)NH₂; | |
| (Gly⁸,Aib³⁵,Arg^{25,26,34},Asp³⁸(1-(4- | (SEQ ID NO.282) |
| dodecylpiperazine)))hGLP-1(7-38)NH₂; | |
| (Gly⁸,Aib³⁵,Arg^{25,26,34},Asp³⁸(1-(4- | (SEQ ID NO.283) |
| tetradecylpiperazine)))hGLP-1(7-38)NH₂; | |
| (Gly⁸,Aib³⁵,Arg^{25,26,34},Asp³⁸(1-(4- | (SEQ ID NO.284) |
| hexadecylpiperazine)))hGLP-1(7-38)NH₂; | |
| (Gly⁸,Aib^{35,37},Arg^{25,26,34},Asp³⁸(1-(4- | (SEQ ID NO.285) |
| decylpiperazine)))hGLP-1(7-38)NH₂; | |
| (Gly⁸,Aib^{35,37},Arg^{25,26,34},Asp³⁸(1-(4- | (SEQ ID NO.286) |
| dodecyipiperazine)))hGLP-1(7-38)NH₂; | |
| (Gly⁸,Aib^{35,37},Arg^{25,26,34},Asp³⁸(1-(4- | (SEQ ID NO.287) |
| tetradecylpiperazine)))hGLP-1(7-38)NH₂; | |
| (Gly⁸,Aib^{35,37},Arg^{25,26,34},Asp³⁸(1-(4- | (SEQ ID NO.288) |
| hexadecylpiperazine)))hGLP-1(7-38)NH₂; | |
| (Gly⁸,Aib³⁵,Arg^{26,34},Glu³⁶(1-dodecylamino))hGLP-1(7-36)NH₂; | (SEQ ID NO.289) |
| (Gly⁸,Aib³⁵,Glu²⁶(1-dodecylamino),Arg³⁴)hGLP-1(7-36)NH₂; | (SEQ ID NO.290) |
| (Gly⁸,Aib³⁵,Arg²⁶,Glu³⁴(1-dodecylamino))hGLP-1(7-36)NH₂; | (SEQ ID NO.291) |
| (Gly⁸,Aib^{35,37},Arg^{26,34},Glu³⁸(1-dodecylamino))hGLP-1(7-38)NH₂; | (SEQ ID NO.292) |
| (Gly⁸,Aib³⁵,Arg³⁴,Lys²⁶(N^{ε}-(2-(4-decyl-1-piperazine)- | (SEQ ID NO.293) |
| acetyl)))hGLP-1(7-36)NH₂; | |
| (Gly⁸,Aib³⁵,Arg³⁴,Lys²⁶(N^{ε}-(2-(4-dodecyl-1-piperazine)- | (SEQ ID NO.294) |
| acetyl)))hGLP-1(7-36)NH₂; | |
| (Gly⁸,Aib³⁵,Arg³⁴,Lys²⁶(N^{ε}-(2-(4-tetradecyl-1-piperazine)- | (SEQ ID NO.295) |
| acetyl)))hGLP-1(7-36)NH₂; | |
| (Gly⁸,Aib³⁵,Arg³⁴,Lys²⁶(N^{ε}-(2-(4-hexadecyl-1-piperazine)- | (SEQ ID NO.296) |
| acetyl)))hGLP-1(7-36)NH₂; | |
| (Gly⁸,Aib³⁵,Arg²⁶,Lys³⁴(N^{ε}-(2-(4-decyl-1-piperazine)- | (SEQ ID NO.297) |
| acetyl)))hGLP-1(7-36)NH₂; | |
| (Gly⁸,Aib³⁵,Arg²⁶,Lys³⁴(N^{ε}-(2-(4-dodecyl-1-piperazine)- | (SEQ ID NO.298) |
| acetyl))hGLP-1(7-36)NH₂; | |
| (Gly⁸,Aib³⁵,Arg²⁶,Lys³⁴(N^{ε}-(2-(4-tetradecyl-1-piperazine)- | (SEQ ID NO.299) |
| acetyl)))hGLP-1(7-36)NH₂; | |
| (Gly⁸,Aib³⁵,Arg²⁶,Lys³⁴(N^{ε}-(2-(4-hexadecyl-1-piperazine) | (SEQ ID NO.300) |
| acetyl)))hGLP-1(7-36)NH₂; | |
| (Gly⁸,Aib³⁵,Arg^{26,34},Lys³⁶(N^{ε}-(2-(4-hexadecyl-1-piperazine)- | (SEQ ID NO.301) |
| acetyl)))hGLP-1(7-36)NH₂; | |
| (Gly⁸,Aib³⁵,Arg^{26,34},Lys³⁶(N^{ε}-(2-(4-dodecyl-1-piperazine)- | (SEQ ID NO.302) |
| acetyl)))hGLP-1(7-36)NH₂; | |
| (Gly⁸,Aib³⁵,Arg^{26,34},Lys³⁶(N^{ε}-(2-(4-hexadecyl-1-piperazine)- | (SEQ ID NO.303) |
| acetyl)))hGLP-1(7-36)NH₂; | |
| (Gly⁸,Aib³⁵,Arg^{26,34},Lys³⁸(N^{ε}-(2-(4-decyl-1-piperazine)- | (SEQ ID NO.304) |
| acetyl)))hGLP-1(7-38)NH₂; | |
| (Gly⁸,Aib³⁵,Arg^{26,34},Lys³⁸(N^{ε}-(2-(4-dodecyl-1-piperazine) | (SEQ ID NO.305) |
| acetyl)))hGLP-1(7-38)NH₂; | |
| (Gly⁸,Aib³⁵,Arg^{26,34},Lys³⁸(N^{ε}-(2-(4-tetradecyl-1-piperazine)- | (SEQ ID NO.306) |
| acetyl)))hGLP-1(7-38)NH₂; | |
| (Gly⁸,Aib³⁵,Arg^{26,34},Lys³⁸(N^{ε}-(2-(4-hexadecyl-1-piperazine)- | (SEQ ID NO.307) |
| acetyl)))hGLP-1(7-38)NH₂; | |
| (Gly⁸,Aib^{35,37},Arg^{26,34},Lys³⁸(N^{ε}-(2-(4-decyl-1-piperazine) | (SEQ ID NO.308) |
| acetyl)))hGLP-1(7-38)NH₂; | |
| (Gly⁸,Aib^{35,37},Arg^{26,34},Lys³⁸(N^{ε}-(2-(4-dodecyl-1-piperazine)- | (SEQ ID NO.309) |
| acetyl)))hGLP-1(7-38)NH₂; | |
| (Gly⁸,Aib^{35,37},Arg^{26,34},Lys³⁸(N^{ε}-(2-(4-tetradecyl-1-piperazine)- | (SEQ ID NO.310) |
| acetyl)))hGLP-1(7-38)NH₂; | |
| (Gly⁸,Aib^{35,37},Arg^{26,34},Lys³⁸(N^{ε}-(2-(4-hexadecyl-1-piperazine) | (SEQ ID NO.311) |
| acetyl)))hGLP-1(7-38)NH₂; | |
| (Gly⁸,Aib³⁵,Arg^{25,34},Lys²⁶(N^{ε}-(2-(4-decyl-1-piperazine)- | (SEQ ID NO.312) |
| acetyl)))hGLP-1(7-36)NH₂; | |
| (Gly⁸,Aib³⁵,Arg^{25,34},Lys²⁶(N^{ε}-(2-(4-dodecyl-1-piperazine)- | (SEQ ID NO.313) |
| acetyl)))hGLP-1(7-36)NH₂; | |
| (Gly⁸,Aib³⁵,Arg^{25,34},Lys²⁶(N^{ε}-(2-(4-tetradecyl-1-piperazine) | (SEQ ID NO.314) |
| acetyl)))hGLP-1(7-36)NH₂; | |
| (Gly⁸,Aib³⁵,Arg^{25,34},Lys²⁶(N^{ε}-(2-(4-hexadecyl-1-piperazine) | (SEQ ID NO.315) |
| acetyl)))hGLP-1(7-36)NH₂; | |
| (Gly⁸,Aib³⁵,Arg^{25,26},Lys³⁴(N^{ε}-(2-(4-decyl-1-piperazine)- | (SEQ ID NO.316) |
| acetyl)))hGLP-1(7-36)NH₂; | |
| (Gly⁸,Aib³⁵,Arg^{25,26},Lys³⁴(N^{ε}-(2-(4-dodecyl-1-piperazine)- | (SEQ ID NO.317) |
| acetyl)))hGLP-1(7-36)NH₂; | |
| (Gly⁸,Aib³⁵,Arg^{25,26},Lys³⁴(N^{ε}-(2-(4-tetradecyl-1-piperazine) | (SEQ ID NO.318) |
| acetyl)))hGLP-1(7-36)NH₂; | |
| (Gly⁸,Aib³⁵,Arg^{25,26},Lys³⁴(N^{ε}-(2-(4-hexadecyl-1-piperazine) | (SEQ ID NO.319) |
| acetyl)))hGLP-1(7-36)NH₂; | |
| (Gly⁸,Aib³⁵,Arg^{25,26,34},Lys³⁶(N^{ε}-(2-(4-decyl-1-piperazine) | (SEQ ID NO.320) |
| acetyl)))hGLP-1(7-36)NH₂; | |
| (Gly⁸,Aib³⁵,Arg^{25,26,34},Lys³⁶(N^{ε}-(2-(4-dodecyl-1-piperazine) | (SEQ ID NO.321) |
| acetyt)))hGLP-1(7-36)NH₂; | |
| (Gly⁸,Aib³⁵,Arg^{25,26,34},Lys³⁶(N^{ε}-(2-(4-tetradecyl-1-piperazine) | (SEQ ID NO.322) |
| acetyl)))hGLP-1(7-36)NH₂; | |
| (Gly⁸,Aib³⁵,Arg^{25,26,34},Lys³⁶(N^{ε}-(2-(4-hexadecyl-1-piperazine) | (SEQ ID NO.323) |
| acetyl)))hGLP-1(7-36)NH₂; | |
| (Gly⁸,Aib³⁵,Arg^{25,26,34},Lys³⁸(N^{ε}-(2-(4-decyl-1-piperazine)- | (SEQ ID NO.324) |
| acetyl)))hGLP-1(7-38)NH₂; | |
| (Gly⁸,Aib³⁵,Arg^{25,26,34},Lys³⁸(N^{ε}-(2-(4-dodecyl-1-piperazine)- | (SEQ ID NO.325) |
| acetyl)))hGLP-1(7-38)NH₂; | |
| (Gly⁸,Aib³⁵,Arg^{25,26,34},Lys³⁸(N^{ε}-(2-(4-tetradecyl-1-piperazine) | (SEQ ID NO.326) |
| acetyl)))hGLP-1(7-38)NH₂; | |
| (Gly⁸,Aib³⁵,Arg^{25,26,34},Lys³⁹(N^{ε}-(2-(4-hexadecyl-1-piperazine) | (SEQ ID NO.327) |
| acetyl)))hGLP-1(7-38)NH₂; | |
| (Gly⁸,Aib^{35,37},Arg^{25,26,34},Lys³⁸(N^{ε}-(2-(4-decyl-1-piperazine) | (SEQ ID NO.328) |
| acetyl)))hGLP-1(7-38)NH₂; | |
| (Gly⁸,Aib^{35,37},Arg^{25,26,34},Lys³⁸(N^{ε}-(2-(4-dodecyl-1-piperazine) | (SEQ ID NO.329) |
| acetyl)))hGLP-1(7-38)NH₂; | |
| (Gly⁸,Aib^{35,37},Arg^{25,26,34},Lys³⁸(N^{ε}-(2-(4-tetradecyl-1-piperazine)- | (SEQ ID NO.330) |
| acetyl)))hGLP-1(7-38)NH₂; | |
| (Gly⁸,Aib^{35,37},Arg^{25,26,34},Lys³⁸(N^{ε}-(2-(4-hexadecyl-1-piperazine) | (SEQ ID NO.331) |
| acetyl)))hGLP-1(7-38)NH₂; | |
| (Gly⁸,Aib³⁵,Arg^{26,34},Lys³⁶(N^{ε}-decanoyl))hGLP-1(7-36)OH; | (SEQ ID NO.332) |
| (Gly⁸,Aib³⁵,Lys²⁵,Arg^{26,34},Lys³⁶(N^{ε}-decanoyl))hGLP-1(7-36)OH; | (SEQ ID NO.333) |
| (Gly⁸,Aib³⁵,Arg^{26,34},Ava³⁷,Ado³⁸)hGLP-1(7-38)NH₂; | (SEQ ID NO.334) |
| (Gly⁸,Aib³⁵,Arg^{26,34},Asp³⁷,Ava³⁶,Ado³⁹)hGLP-1(7-39)NH₂; | (SEQ ID NO.335) |
| (Gly⁸,Aib³⁵,Arg^{26,34},Aun³⁷)hGLP-1(7-37)NH₂; | (SEQ ID NO.336) |
| (Gly⁸,Aib^{17,35})hGLP-1(7-36)NH₂; | (SEQ ID NO.337) |
| (Gly⁸,Arg^{26,34},β-Ala³⁵,D-Asp³⁷,Ava³⁸,Aun³⁹)hGLP-1(7-39)NH₂; | (SEQ ID NO.338) |
| (Gly⁸,Glu^{22,23},β-Ala³⁵)hGLP-1(7-36)NH₂; | (SEQ ID NO.339) |
| (Gly⁸,Lys¹⁸,β-Ala³⁵)hGLP-1(7-36)NH₂; | (SEQ ID NO.340) |
| (Gly⁸,Leu²⁷,β-Ala³⁵)hGLP-1(7-36)NH₂; | (SEQ ID NO.341) |
| (Gly⁸,Lys³³,β-Ala³⁵)hGLP-1(7-36)NH₂; | (SEQ ID NO.342) |
| (Gly⁸,Lys¹⁸,Leu²⁷,(β-Ala³⁵)hGLP-1(7-36)NH₂; | (SEQ ID NO.343) |
| (Gly⁸,D-Arg³⁶)hGLP-1(7-36)NH₂; | (SEQ ID NO.344) |
| (Gly⁸,β-Ala³⁵,D-Arg³⁷)hGLP-1(7-37)NH₂; | (SEQ ID NO.345) |
| (Gly⁸,Aib²⁷,β-Ala³⁵)hGLP-1(7-36)NH₂; | (SEQ ID NO.346) |
| (Gly⁸,Aib²⁷,β-Ala^{35,37},Arg³⁸)hGLP-1(7-38)NH₂; | (SEQ ID NO.347) |
| (Gly⁸,Aib²⁷,(β-Ala^{35,37},Arg^{38,39})hGLP-1(7-39)NH₂; | (SEQ ID NO.348) |
| (Gly⁸,Lys^{18,27},β-Ala³⁵)hGLP-1(7-36)NH₂; | (SEQ ID NO.349) |
| (Gly⁸,Lys²⁷,β-Ala³⁵)hGLP-1(7-36)NH₂; | (SEQ ID NO.350) |
| (Gly⁸,β-Ala³⁵,Arg³⁸)hGLP-1(7-38)NH₂; | (SEQ ID NO.351) |
| (Gly⁸,Arg^{26,34},β-Ala³⁵,)hGLP-1(7-36)NH₂; | (SEQ ID NO.352) |
| (Gly⁸,D-Arg³⁵)hGLP-1(7-36)NH₂; | (SEQ ID NO.353) |
| (Gly⁸,β-Ala³⁵,Arg³⁷)hGLP-1(7-37)NH₂; | (SEQ ID NO.354) |
| (Gly⁸,Phe³¹,β-Ala³⁵)hGLP-1(7-36)NH₂; | (SEQ ID NO.355) |
| (Gly⁸,Aib³⁵,Phe³¹)hGLP-1(7-36)NH₂; | (SEQ ID NO.356) |
| (Gly⁸,Aib³⁵,2-Nal³¹)hGLP-1(7-36)NH₂; | (SEQ ID NO.357) |
| (Gly⁸,Aib³⁵,2-Nal^{28,31})hGLP-1(7-36)NH₂; | (SEQ ID NO.358) |
| (Gly⁸,Aib³⁵,Arg^{26,34},2-Nal³¹)hGLP-1(7-36)NH₂; | (SEQ ID NO.359) |
| (Gly⁸,Aib³⁵,Arg^{26,34},Phe³¹)hGLP-1(7-36)NH₂; | (SEQ ID NO.360) |
| (Gly⁸,Aib³⁵,2-Nal^{19,31})hGLP-1(7-36)NH₂; | (SEQ ID NO.361) |
| (Gly⁸,Aib³⁵,2-Nal^{12,31})hGLP-1(7-36)NH₂; | (SEQ ID NO.362) |
| (Gly⁸,Aib³⁵,Lys³⁶(N^{ε}-decanoyl))hGLP-1(7-36)NH₂; | (SEQ ID NO.363) |
| (Gly⁸,Aib³⁵,Arg³⁴,Lys²⁶(N^{ε}-decanoyl))hGLP-1(7-36)NH₂; | (SEQ ID NO.364) |
| (Gly⁸,Aib³⁵,Arg^{26,34},Lys³⁶(N^{ε}-dodecanoyl))hGLP-1(7-36)NH₂; | (SEQ ID NO.365) |
| (Gly⁸,β-Ala³⁵,Ser³⁷(O-decanoyl))hGLP1(7-37)-NH₂; | (SEQ ID NO.366) |
| (Gly⁸,Aib²⁷,β-Ala^{35,37},Arg³⁸,Lys³⁹(N^{ε}-octanoyl))hGLP-1(7-39)NH₂; | (SEQ ID NO.367) |
| (Gly⁸,Arg^{26,34},β-Ala³⁵,Lys³⁷(N^{ε}-octanoyl))hGLP-1(7-37)NH₂; | (SEQ ID NO.368) |
| (Gly⁸,Arg^{26,34},β-Ala³⁵,Lys³⁷(N^{ε}-decanoyl))hGLP-1(7-37)NH₂; | (SEQ ID NO.369) |
| (Gly⁸,Arg^{26,34},β-Ala³⁵,Lys³⁷(N^{ε}-tetradecanoyl))hGLP-1(7-37)NH₂; | (SEQ ID NO.370) |
| (Gly⁸,Arg^{26,34},β-Ala³⁵,Lys³⁷(N^{ε}-dodecanoyl))hGLP-1(7-37)NH₂; | (SEQ ID NO.371) |
| (Gly⁸,Arg^{26,34},β-Ala³⁵,Lys³⁷(N^{ε}-dodecanoyl))hGLP-1(8-37)NH₂; | (SEQ ID NO.372) |
| (Gly⁸,Arg²⁶,Aib³⁵)hGLP-1(7-36)NH₂; | (SEQ ID NO.373) |
| (Gly⁸,Arg²⁶,Phe³¹,Aib³⁵)hGLP-1(7-36)NH₂; | (SEQ ID NO.374) |
| (Gly⁸,Arg²⁶,Phe³¹,β-Ala³⁵)hGLP-1(7-36)NH₂; | (SEQ ID NO.375) |
| (Gly⁸,Arg²⁶,β-Ala³⁵)hGLP-1(7-36)NH₂; | (SEQ ID NO.376) |
| (Gly⁸,Arg^{26,34},Phe³¹,Aib³⁵)hGLP-1(7-36)NH₂; | (SEQ ID NO.377) |
| (Gly⁸,Arg^{26,34},Phe³¹,β-Ala³⁵)hGLP-1(7-36)NH₂; | (SEQ ID NO.378) |
| (Gly⁸,Arg³⁴,Aib³⁵)hGLP-1(7-36)NH₂; | (SEQ ID NO.379) |
| (Gly⁸,Arg³⁴,β-Ala³⁵)hGLP-1(7-36)NH₂; | (SEQ ID NO.380) |
| (Gly⁸,Phe³¹,Arg³⁴,Aib³⁵)hGLP-1(7-36)NH₂; | (SEQ ID NO.381) |
| (Gly⁸,Phe³¹,Arg³⁴,β-Ala³⁵)hGLP-1(7-36)NH₂; | (SEQ ID NO.382) |
| (Gly⁸,Arg^{26,34},β-Ala³⁵,Lys³⁸(N^{ε}-Aec-decanoyl))hGLP-1(7-36)NH₂; | (SEQ ID NO.383) |
| or | |
| (Gly⁸,β-Ala³⁵,Ser³⁷(O-decanoyl))hGLP1(7-37)-NH₂; | (SEQ ID NO.384) |

or a pharmaceutically acceptable salt thereof.

[0068] Another preferred compound of the group of compounds described in paragraph [067] is a compound according to the formula:

| | |
|---|---|
| ((N^{α}-Me-His)⁷,Ser⁸,Aib³⁵)hGLP-1(7-36)NH₂; | (SEQ ID NO.385) |
| ((N^{α}-Me-His)⁷,Ser⁸,β-Ala³⁵)hGLP-1(7-36)NH₂; | (SEQ ID NO.386) |
| ((N^{α}-Me-His)⁷,Ser⁸,Aib³⁵,Arg^{26,34})hGLP-1(7-36)NH₂; | (SEQ ID NO.387) |
| ((N^{α}-Me-His)⁷,Ser⁸,Arg^{26,34},β-Ala³⁵)hGLP-1(7-36)NH₂; | (SEQ ID NO.388) |
| (Ser⁸,A6c³⁵)hGLP-1(7-36)NH₂; | (SEQ ID NO.389) |
| (Ser⁸,A5c³⁵)hGLP-1(7-36)NH₂; | (SEQ ID NO.390) |
| (Ser⁸,D-Ala³⁵)hGLP-1(7-36)NH₂; | (SEQ ID NO.391) |
| (Ser⁸,Aib³⁵,A6c³²)hGLP-1(7-36)NH₂; | (SEQ ID NO.392) |
| (Ser⁸,Aib³⁵,A5c³²)hGLP-1(7-36)NH₂; | (SEQ ID NO.393) |
| (Ser⁸,Aib³⁵,Glu²³)hGLP-1(7-36)NH₂; | (SEQ ID NO.394) |
| (Ser⁸,Aib^{24,35})hGLP-1(7-36)NH₂; | (SEQ ID NO.395) |
| (Ser⁸,Aib^{30,35})hGLP-1(7-36)NH₂; | (SEQ ID NO.396) |
| (Ser⁸,Aib^{25,35})hGLP-1(7-36)NH₂; | (SEQ ID NO.397) |
| (Ser⁸,Aib³⁵,A6c^{16,20})hGLP-1(7-36)NH₂; | (SEQ ID NO.398) |
| (Ser⁸,Aib³⁵,A6c^{16,29,32})hGLP-1(7-36)NH₂; | (SEQ ID NO.399) |
| (Ser⁸,Aib³⁵,A6c^{20,32})hGLP-1(7-36)NH₂; | (SEQ ID NO.400) |
| (Ser⁸,Aib³⁵,A6c²⁰)hGLP-1(7-36)NH₂; | (SEQ ID NO.401) |
| (Ser⁸,Aib³⁵,Lys²⁵)hGLP-1(7-36)NH₂; | (SEQ ID NO.402) |
| (Ser⁸,Aib^{24,35},A6c²⁰)hGLP-1(7-36)NH₂; | (SEQ ID NO.403) |
| (Ser⁸,Aib³⁵,A6c^{29,32})hGLP-1(7-36)NH₂; | (SEQ ID NO.404) |
| (Ser⁸,Aib^{24,35},A6c^{29,32})hGLP-1(7-36)NH₂: | (SEQ ID NO.405) |
| (Ser⁸,Aib³⁵,A6c¹²)hGLP-1(7-36)NH₂; | (SEQ ID NO.406) |
| (Ser⁸,Aib³⁵,Cha²⁰)hGLP-1(7-36)NH₂; | (SEQ ID NO.407) |
| (Ser⁸,Aib³⁵,A6c³³)hGLP-1(7-36)NH₂; | (SEQ ID NO.408) |
| (Ser⁸,A6c^{16,20},β-Ala³⁵)hGLP-1(7-36)NH₂; | (SEQ ID NO.409) |
| (Ser⁸,Aib³⁵,β-Ala²²)hGLP-1(7-36)NH₂; | (SEQ ID NO.410) |
| (Ser⁸,Aib^{22,35})hGLP-1(7-36)NH₂; | (SEQ ID NO.411) |
| (Ser⁸,Aib³⁵,Glu²³,A6c³²)hGLP-1(7-36)NH₂; | (SEQ ID NO.412) |
| (Ser⁸,Aib^{24,35},Glu²³,A6c³²)hGLP-1(7-36)NH₂; | (SEQ ID NO.413) |
| (Ser⁸,Aib^{24,25,35},Glu²³,A6c³²)hGLP-1(7-36)NH₂; | (SEQ ID NO.414) |
| (Ser⁸,Aib^{24,25,35},A6c^{16,20,32},Glu²³)hGLP-1(7-36)NH₂; | (SEQ ID NO.415) |
| (Ser⁸,A6c³²,β-Ala³⁵)hGLP-1(7-36)NH₂; | (SEQ ID NO.416) |
| (Ser⁸,A5C32,β-Ala³⁵)hGLP-1(7-36)NH₂; | (SEQ ID NO.417) |
| (Ser⁸,Glu²³,β-Ala³⁵)hGLP-1(7-36)NH₂; | (SEQ ID NO.418) |
| (Ser⁸,Aib²⁴,β-Ala³⁵)hGLP-1(7-36)NH₂; | (SEQ ID NO.419) |
| (Ser⁸,Aib³⁰,β-Ala³⁵)hGLP-1(7-36)NH₂; | (SEQ ID NO.420) |
| (Ser⁸,Aib²⁵,β-Ala³⁵)hGLP-1(7-36)NH₂; | (SEQ ID NO.421) |
| (Ser⁸,A6c^{16,29,32},β-Ala³⁵)hGLP-1(7-36)NH₂; | (SEQ ID NO.422) |
| (Ser⁸,A6c^{20,32},β-Ala³⁵)hGLP-1(7-36)NH₂; | (SEQ ID NO.423) |
| (Ser⁸,A6c²⁰,β-Ala³⁵)hGLP-1(7-36)NH₂; | (SEQ ID NO.424) |
| (Ser⁸,Lys²⁵,β-Ala³⁵)hGLP-1(7-36)NH₂; | (SEQ ID NO.425) |
| (Ser⁸,Aib²⁴,A6c²⁰,β-Ala³⁵)hGLP-1(7-36)NH₂; | (SEQ ID NO.426) |
| (Ser⁸,A6c^{29,32},β-Ala³⁵)hGLP-1(7-36)NH₂; | (SEQ ID NO.427) |
| (Ser⁸,Aib²⁴,A6c^{29,32},β-Ala³⁵)hGLP-1(7-36)NH₂; | (SEQ ID NO.428) |
| (Ser⁸,A6c¹²,β-Ala³⁵)hGLP-1(7-36)NH₂; | (SEQ ID NO.429) |
| (Ser⁸,Cha²⁰,β-Ala³⁵)hGLP-1(7-36)NH₂; | (SEQ ID NO.430) |
| (Ser⁸,A6c³³,β-Ala³⁵)hGLP-1(7-36)NH₂; | (SEQ ID NO.431) |
| (Ser⁸,β-Ala^{22,35})hGLP-1(7-36)NH₂; | (SEQ ID NO.432) |
| (Ser⁸,Aib²²,(β-Ala³⁵)hGLP-1(7-36)NH₂; | (SEQ ID NO.433) |
| (Ser⁸,Glu²³,A6c³²,β-Ala³⁵)hGLP-1(7-36)NH₂; | (SEQ ID NO.434) |
| (Ser⁸,Aib²⁴,Glu²³,A6c³²,β-Ala³⁵)hGLP-1(7-36)NH₂; | (SEQ ID NO.435) |
| (Ser⁸,Aib²⁴,Glu²³,A6c³²,Lys³⁴(N^{e}octanoyl),β- | (SEQ ID NO.436) |
| Ala³⁵)hGLP-1(7-36)NH₂; | |
| (Ser⁸,Aib^{24,25},Glu²³,A6c³²,β-Ala³⁵)hGLP-1(7-36)NH₂; | (SEQ ID NO.437) |
| (Ser⁸,Aib^{24,25},A6c^{16,20,32},Glu²³,(β-Ala³⁵)hGLP-1(7-36)NH₂; | (SEQ ID NO.438) |
| (Ser⁸,Aib³⁵,D-Arg³⁶)hGLP-1(7-36)NH₂; | (SEQ ID NO.439) |
| (Ser⁸,Aib³⁵,D-Lys³⁵)hGLP-1(7-36)NH₂; | (SEQ ID NO.440) |
| (Ser⁸,β-Ala³⁵,D-Arg³⁶)hGLP-1(7-36)NH₂; | (SEQ ID NO.441) |
| (Ser⁸,β-Ala³⁵,D-Lys³⁶)hGLP-1(7-36)NH₂; | (SEQ ID NO.442) |
| (Ser⁸,Aib³⁵,Arg^{26,34})hGLP-1(7-36)NH₂; | (SEQ ID NO.443) |
| (Ser⁸,Arg^{26,34},β-Ala³⁵)hGLP-1(7-36)NH₂; | (SEQ ID NO.444) |
| (Ser⁸,Aib³⁵,Arg^{25,26,34})hGLP-1(7-36)NH₂; | (SEQ ID NO.445) |
| (Ser⁸,Arg^{25,26,34},β-Ala³⁵)hGLP-1(7-36)NH₂; | (SEQ ID NO.446) |
| (Ser⁸,Arg^{26,34},β-Ala³⁵,Lys³⁵(N^{ε}-tetradecanoyl))hGLP-1(7-36)OH; | (SEQ ID NO.447) |
| (Ser⁸,Aib³⁵,Arg^{26,34},Lys³⁶(N^{ε}-tetradecanoyl))hGLP-1(7-37)OH; | (SEQ ID NO.448) |
| (Ser⁸,Aib^{35,37},Arg^{26,34},Lys³⁶(N^{ε}-tetradecanoyl))hGLP-1(7-37)OH; | (SEQ ID NO.449) |
| (Ser⁸,Aib³⁵,Arg^{26,34},Lys³⁶(N^{ε}-tetradecanoyl),D | (SEQ ID NO.450) |
| Ala³⁷)hGLP-1(7-37)OH; | |
| (Ser⁸,Aib^{35,37},Arg^{26,34},Lys³⁸(N^{ε}-tetradecanoyl))hGLP-1(7-38)OH; | (SEQ ID NO.451) |
| (Ser⁸,Aib³⁵,Arg^{26,34},β-Ala³⁷,Lys³⁸(N^{ε}- | (SEQ ID NO.452) |
| tetradecanoyl))hGLP-1(7-38)OH; | |
| (Ser⁸,Aib³⁵,Arg^{26,34},Lys³⁸(N^{ε}-tetradecanoyl))hGLP-1(7-38)OH; | (SEQ ID NO.453) |
| (Ser⁸,Arg^{26,34},Lys³⁶(N^{ε}-tetradecanoyl),β-Ala³⁷)hGLP-1(7-37)OH; | (SEQ ID NO.454) |
| (Ser⁸,Aib³⁷,Arg^{26,34},Lys³⁶(N^{ε}-tetradecanoyl))hGLP-1(7-37)OH; | (SEQ ID NO.455) |
| (Ser⁸,Aib³⁵,Arg^{26,34},Ado³⁷)hGLP-1(7-37)OH; | (SEQ ID NO.456) |
| (Ser⁸,Aib³⁵,Arg^{26,34},Ado³⁷)hGLP-1(7-37)NH₂; | (SEQ ID NO.457) |
| (Ser⁸,Arg^{26,34},Lys³⁶(N^{ε}-tetradecanoyl),D-Ala³⁷)hGLP-1(7-37)OH; | (SEQ ID NO.458) |
| (Ser⁸,Aib³⁷,Arg^{26,34},Lys³⁸(N^{ε}-tetradecanoyl))hGLP-1(7-38)OH; | (SEQ ID NO.459) |
| (Ser⁸,Arg^{26,34},β-Ala³⁷,Lys³⁸(N^{ε}-tetradecanoyl))hGLP-1(7-38)OH; | (SEQ ID NO.460) |
| (Ser⁸,Aib³⁵,Lys²⁶(N^{ε}-octanoyl))hGLP-1(7-36)NH₂; | (SEQ ID NO.461) |
| (Ser⁸,Aib³⁵,Lys²⁶(N^{ε}-tetradecanoyl))hGLP-1(7-36)NH₂; | (SEQ ID NO.462) |
| (Ser⁸,Aib³⁵,Lys²⁶(N^{ε}-hexadecanoyI))hGLP-1(7-36)NH₂; | (SEQ ID NO.463) |
| (Ser⁸,Lys²⁶(N^{ε}-octanoyl),β-Ala³⁵)hGLP-1(7-36)NH₂; | (SEQ ID NO.464) |
| (Ser⁸,Lys²⁶(N^{ε}-tetradecanoyl),β-Ala³⁵)hGLP-1(7-36)NH₂; | (SEQ ID NO.465) |
| (Ser⁸,Lys²⁶(N^{ε}-hexadecanoyl),β-Ala³⁵)hGLP-1(7-36)NH₂; | (SEQ ID NO.466) |
| (Ser⁸,Aib³⁵,Lys²⁶(N^{ε}-octanoyl),Arg³⁴)hGLP-1(7-36)NH₂; | (SEQ ID NO.467) |
| (Ser⁸,Aib³⁵,Lys²⁶(N^{ε}-tetradecanoyl),Arg³⁴)hGLP-1(7-36)NH₂; | (SEQ ID NO.468) |
| (Ser⁸,Aib³⁵,Lys²⁶(N^{ε}-hexadecanoyl),Arg³⁴)hGLP-1(7-36)NH₂; | (SEQ ID NO.469) |
| (Ser⁸,Aib³⁵,Lys²⁶(N^{ε}-decanoyl),Arg³⁴)hGLP-1(7-36)NH₂; | (SEQ ID NO.470) |
| (Ser⁸,Aib³⁵,Lys²⁵,Lys²⁶(N^{ε}-octanoyl),Arg³⁴)hGLP-1(7-36)NH₂; | (SEQ ID NO.471) |
| (Ser⁸,Aib³⁵,Lys²⁵,Lys²⁶(N^{ε}-tetradecanoyl), | (SEQ ID NO.472) |
| Arg³⁴)hGLP-1(7-36)NH₂; | |
| (Ser⁸,Aib³⁵,Lys²⁵,Lys²⁶(N^{ε}-hexadecanoyl), | (SEQ ID NO.473) |
| Arg³⁴)hGLP-1(7-36)NH₂; | |
| (Ser⁸,Aib³⁵,Arg^{25,34},Lys²⁶(N^{ε}-octanoyl))hGLP-1(7-36)NH₂; | (SEQ ID NO.474) |
| (Ser⁸,Aib³⁵,Arg^{25,34},Lys²⁶(N^{ε}-tetradecanoyl))hGLP-1(7-36)NH₂; | (SEQ ID NO.475) |
| (Ser⁸,Aib³⁵,Arg^{25,34},Lys²⁶(N^{ε}-hexadecanoyl))hGLP-1(7-36)NH₂; | (SEQ ID NO.476) |
| (Ser⁸,Aib³⁵,Arg^{25,34},Lys²⁶(N^{ε}-decanoyl))hGLP-1(7-36)NH₂; | (SEQ ID NO.477) |
| (Ser⁸,Lys²⁶(N^{ε}-octanoyl),Arg³⁴,β-Ala³⁵)hGLP-1(7-36)NH₂; | (SEQ ID NO.478) |
| (Ser⁸,Lys²⁶(N^{ε}-tetradecanoyl),Arg³⁴,β-Ala³⁵)hGLP-1(7-36)NH₂; | (SEQ ID NO.479) |
| (Ser⁸,Lys²⁶(N^{ε}-hexadecanoyl),Arg³⁴,β-Ala³⁵)hGLP-1(7-36)NH₂; | (SEQ ID NO.480) |
| (Ser⁸,Lys²⁶(N^{ε}-decanoyl),Arg³⁴,β-Ala³⁵)hGLP-1(7-36)NH₂; | (SEQ ID NO.481) |
| (Ser⁸,Aib³⁵,Lys³⁴(N^{ε}-octanoyl))hGLP-1(7-36)NH₂; | (SEQ ID NO.482) |
| (Ser⁸,Aib³⁵,Lys³⁴(N^{ε}-tetradecanoyl))hGLP-1(7-36)NH₂; | (SEQ ID NO.483) |
| (Ser⁸,Aib³⁵,Lys³⁴(N^{ε}-hexadecanoyl))hGLP-1(7-36)NH₂; | (SEQ ID NO.484) |
| (Ser⁸,Aib³⁵,Arg²⁶,Lys³⁴(N^{ε}-octanoyl))hGLP-1(7-36)NH₂; | (SEQ ID NO.485) |
| (Ser⁸,Aib³⁵,Arg²⁶,Lys³⁴(N^{ε}-hexadecanoyl))hGLP-1(7-36)NH₂; | (SEQ ID NO.486) |
| (Ser⁸,Aib³⁵,Arg²⁶,Lys³⁴(N^{ε}-decanoyl))hGLP-1(7-36)NH₂; | (SEQ ID NO.487) |
| (Ser⁸,Aib³⁵,Arg^{25,26},Lys³⁴(N^{ε}-octanoyl))hGLP-1(7-36)NH₂; | (SEQ ID NO.488) |
| (Ser⁸,Aib³⁵,Arg^{25,26},Lys³⁴(N^{ε}-tetradecanoyl))hGLP-1(7-36)NH₂; | (SEQ ID NO.489) |
| (Ser⁸,Aib³⁵,Arg^{25,26},Lys³⁴(N^{ε}-hexadecanoyl))hGLP-1(7-36)NH₂; | (SEQ ID NO.490) |
| (Ser⁸,Aib³⁵,Arg^{25,26},Lys³⁴(N^{ε}-decanoyl))hGLP-1(7-36)NH₂; | (SEQ ID NO.491) |
| (Ser⁸,Aib³⁵,Lys²⁵,Arg²⁶,Lys³⁴(N^{ε}-octanoyl))hGLP-1(7-36)NH₂; | (SEQ ID NO.492) |
| (Ser⁸,Aib³⁵,Lys²⁵,Arg²⁶,Lys³⁴(N^{ε}- | (SEQ ID NO.493) |
| tetradecanoyl))hGLP-1(7-36)NH₂; | |
| (Ser⁸,Aib³⁵,Lys²⁵,Arg²⁶,Lys³⁴(N^{ε}- | (SEQ ID NO.494) |
| hexadecanoyl))hGLP-1(7-36)NH₂; | |
| (Ser⁸,Aib³⁵,Lys³⁶(N^{ε}-octanoyl))hGLP-1(7-36)NH₂; | (SEQ ID NO.495) |
| (Ser⁸,Aib³⁵,Lys³⁶(N^{ε}-tetradecanoyl))hGLP-1(7-36)NH₂; | (SEQ ID NO.496) |
| (Ser⁸,Aib³⁵,Lys³⁶(N^{ε}-hexadecanoyl))hGLP-1(7-36)NH₂; | (SEQ ID NO.497) |
| (Ser⁸,Aib³⁵,Arg²⁶,Lys³⁶(N^{ε}-octanoyl))hGLP-1(7-36)NH₂; | (SEQ ID NO.498) |
| (Ser⁸,Aib³⁵,Arg²⁶,Lys³⁶(N^{ε}-tetradecanoyl))hGLP-1(7-36)NH₂; | (SEQ ID NO.499) |
| (Ser⁸,Aib³⁵,Arg²⁶,Lys³⁶(N^{ε}-hexadecanoyl))hGLP-1(7-36)NH₂; | (SEQ ID NO.500) |
| (Ser⁸,Aib³⁵,Arg^{26,34},Lys³⁶(N^{ε}-octanoyl))hGLP-1(7-36)NH₂; | (SEQ ID NO.501) |
| (Ser⁸,Aib³⁵,Arg^{26,34},Lys³⁶(N^{ε}-hexadecanoyl))hGLP-1(7-36)NH₂; | (SEQ ID NO.502) |
| (Ser⁸,Aib³⁵,Arg^{26,34},Lys³⁸(N^{ε}-octanoyl))hGLP-1(7-38)NH₂; | (SEQ ID NO.503) |
| (Ser⁸,Aib³⁵,Arg^{26,34},Lys³⁸(N^{ε}-decanoyl))hGLP-1(7-38)NH₂; | (SEQ ID NO.504) |
| (Ser⁸,Aib³⁵,Arg^{26,34},Lys³⁸(N^{ε}-tetradecanoyl))hGLP-1(7-38)NH₂; | (SEQ ID NO.505) |
| (Ser⁸,Aib³⁵,Arg^{26,34},Lys³⁸(N^{ε}-hexadecanoyl))hGLP-1(7-38)NH₂; | (SEQ ID NO.506) |
| (Ser⁸,Aib^{35,37},Arg^{25,26,34},Lys³⁸(N^{ε}-octanoyl))hGLP-1(7-38)NH₂; | (SEQ ID NO.507) |
| (Ser⁸,Aib^{35,37},Arg^{25,26,34},Lys³⁸(N^{ε}-decanoyl))hGLP-1(7-38)NH₂; | (SEQ ID NO.508) |
| (Ser⁸,Aib^{35,37},Arg^{25,26,34},Lys³⁸(N^{ε}- | (SEQ ID NO.509) |
| tetradecanoyl))hGLP-1(7-38)NH₂; | |
| (Ser⁸,Aib^{35,37},Arg^{25,26,34},Lys³⁸(N^{ε}- | (SEQ ID NO.510) |
| hexadecanoyl))hGLP-1(7-38)NH₂; | |
| (Ser⁸,Aib^{35,37},Arg^{26,34},Lys³⁸(N^{ε}-octanoyl))hGLP-1(7-38)NH₂; | (SEQ ID NO.511) |
| (Ser⁸,Aib^{35,37},Arg^{26,34},Lys³⁸(N^{ε}-decanoyl))hGLP-1(7-38)NH₂; | (SEQ ID NO.512) |
| (Ser⁸,Aib^{35,37},Arg^{26,34},Lys³⁸(N^{ε}-hexadecanoyl))hGLP-1(7-38)NH₂; | (SEQ ID NO.513) |
| (Ser⁸,Aib³⁵,Lys²⁵,Arg^{26,34},Lys³⁶(N^{ε}-octanoyl))hGLP-1(7-36)NH₂; | (SEQ ID NO.514) |
| (Ser⁸,Aib³⁵,Lys²⁶,Arg^{26,34},Lys³⁶(N^{ε}- | (SEQ ID NO.515) |
| tetradecanoyl))hGLP-1(7-36)NH₂; | |
| (Ser⁸,Aib³⁵,Lys²⁵,Arg^{26,34},Lys³⁶(N^{ε}- | (SEQ ID NO.516) |
| hexadecanoyl))hGLP-1(7-36)NH₂; | |
| (Ser⁸,Aib³⁵,Arg^{25,26,34},Lys³⁶(N^{ε}-octanoyl))hGLP-1(7-36)NH₂; | (SEQ ID NO.517) |
| (Ser⁸,Aib³⁵,Arg^{25,26,34},Lys³⁶(N^{ε}-tetradecanoyl))hGLP-1(7-36)NH₂; | (SEQ ID NO.518) |
| (Ser⁸,Aib³⁵,Arg^{25,26,34},Lys³⁶(N^{ε}-hexadecanoyl))hGLP-1(7-36)NH₂; | (SEQ ID NO.519) |
| (Ser⁸,Aib³⁵,Arg^{25,26,34},Lys³⁶(N^{ε}-decanoyl))hGLP-1(7-36)NH₂; | (SEQ ID NO.520) |
| (Ser⁸,Lys³⁴(N^{ε}-octanoyl),β-Ala³⁵)hGLP-1(7-36)NH₂; | (SEQ ID NO.521) |
| (Ser⁸,Lys³⁴(N^{ε}-tetradecanoyl),β-Ala³⁵)hGLP-1(7-36)NH₂; | (SEQ ID NO.522) |
| (Ser⁸,Lys³⁴(N^{ε}-hexadecanoyt),β-Ala³⁵)hGLP-1(7-36)NH₂; | (SEQ ID NO.523) |
| (Ser⁸,A6c³²,Lys³⁴(N^{e}octanoyl),β-Ala³⁵)hGLP-1(7-36)NH₂; | (SEQ ID NO.524) |
| (Ser⁸,Glu²³,Lys³⁴(N^{e}octanoyl),β-Ala³⁵)hGLP-1(7-36)NH₂; | (SEQ ID NO.525) |
| (Ser⁸,Glu²³,A6c³²,Lys³⁴(N^{e}octanoyl),β-Ala³⁵)hGLP-1(7-36)NH₂; | (SEQ ID NO.526) |
| (Ser⁸,Arg²⁶,Lys³⁴(N^{ε}-octanoyl),β-Ala³⁵)hGLP-1(7-36)NH₂; | (SEQ ID NO.527) |
| (Ser⁸,Arg²⁶,Lys³⁴(N^{ε}-tetradecanoyl),β-Ala³⁵)hGLP-1(7-36)NH₂; | (SEQ ID NO.528) |
| (Ser⁸,Arg²⁶,Lys³⁴(N^{ε}-hexadecanoyl),β-Ala³⁵)hGLP-1(7-36)NH₂; | (SEQ ID NO.529) |
| (Ser⁸,Arg²⁶,Lys³⁴(N^{ε}-decanoyl),β-Ala³⁵)hGLP-1(7-36)NH₂; | (SEQ ID NO.530) |
| (Ser⁸,Arg^{25,26},Lys³⁴(N^{ε}-octanoyl),β-Ala³⁵)hGLP-1(7-36)NH₂; | (SEQ ID NO.531) |
| (Ser⁸,Arg^{25,26},Lys³⁴(N^{ε}-tetradecanoyl),β-Ala³⁵)hGLP-1(7-36)NH₂; | (SEQ ID NO.532) |
| (Ser⁸,Arg^{25,26},Lys³⁴(N^{ε}-hexadecanoyl),β-Ala³⁵)hGLP-1(7-36)NH₂; | (SEQ ID NO.533) |
| (Ser⁸,Arg^{25,26},Lys³⁴(N^{ε}-decanoyl),β-Ala³⁵)hGLP-1(7-36)NH₂; | (SEQ ID NO.534) |
| (Ser⁸,Lys²⁵,Arg²⁶,Lys³⁴(N^{ε}-octanoyl),β-Ala³⁵)hGLP-1(7-36)NH₂; | (SEQ ID NO.535) |
| (Ser⁸,Lys²⁵,Arg²⁶,Lys³⁴(N^{ε}-tetradecanoyl),β- | (SEQ ID NO.536) |
| Ala³⁵)hGLP-1(7-36)NH₂; | |
| (Ser⁸,Lys²⁵,Arg²⁶,Lys³⁴(N^{ε}-hexadecanoyl),β- | (SEQ ID NO.537) |
| Ala³⁵)hGLP-1(7-36)NH₂; | |
| (Ser⁸,β-Ala³⁵,Lys³⁶(N^{ε}-octanoyl))hGLP-1(7-36)NH₂; | (SEQ ID NO.538) |
| (Ser⁸,β-Ala³⁵,Lys³⁶(N^{ε}-tetradecanoyl))hGLP-1(7-36)NH₂; | (SEQ ID NO.539) |
| (Ser⁸,β-Ala³⁵,Lys³⁶(N^{ε}-hexadecanoyl))hGLP-1(7-36)NH₂; | (SEQ ID NO.540) |
| (Ser⁸,Arg²⁶,β-Ala³⁵,Lys³⁶(N^{ε}-octanoyl))hGLP-1(7-36)NH₂; | (SEQ ID NO.541) |
| (Ser⁸,Arg²⁶,β-Ala³⁵,Lys³⁶(N^{ε}-tetradecanoyl))hGLP-1(7-36)NH₂; | (SEQ ID NO.542) |
| (Ser⁸,Arg²⁶,β-Ala³⁵,Lys³⁶(N^{ε}-hexadecanoyl))hGLP-1(7-36)NH₂; | (SEQ ID NO.543) |
| (Ser⁸,Arg^{26,34},β-Ala³⁵,Lys³⁶(N^{ε}-octanoyl))hGLP-1(7-36)NH₂; | (SEQ ID NO.544) |
| (Ser⁸,Arg^{26,34},β-Ala³⁵,Lys³⁶(N^{ε}-tetradecanoyl))hGLP-1(7-36)NH₂; | (SEQ ID NO.545) |
| (Ser⁸,Arg^{26,34},β-Ala³⁵,Lys³⁵(N^{ε}-hexadecanoyl))hGLP-1(7-36)NH₂; | (SEQ ID NO.546) |
| (Ser⁸,Arg^{26,34},β-Ala³⁵,Lys³⁶(N^{ε}-decanoyl))hGLP-1(7-36)NH₂; | (SEQ ID NO.547) |
| (Ser⁸,Lys²⁵,Arg^{26,34},β-Ala³⁵,Lys³⁶(N^{ε}- | (SEQ ID NO.548) |
| octanoyl))hGLP-1(7-36)NH₂; | |
| (Ser⁸,Lys²⁵,Arg^{26,34},Lys³⁶(N^{ε}-tetradecanoyl),β | (SEQ ID NO.549) |
| Ala³⁵)hGLP-1(7-36)NH₂; | |
| (Ser⁸,Lys²⁵,Arg^{26,34},β-Ala³⁵,Lys³⁶(N^{ε}- | (SEQ ID NO.550) |
| hexadecanoyl))hGLP-1(7-36)NH₂; | |
| (Ser⁸,Arg^{25,26,34},β-Ala³⁵,Lys³⁶(N^{ε}-octanoyl))hGLP-1(7-36)NH₂; | (SEQ ID NO.551) |
| (Ser⁸,Arg^{25,26,34},β-Ala³⁵,Lys³⁶(N^{ε}- | (SEQ ID NO.552) |
| tetradecanoyl))hGLP-1(7-36)NH₂; | |
| (Ser⁸,Arg^{25,26,34},β-Ala³⁵,Lys³⁶(N^{ε}- | (SEQ ID NO.553) |
| hexadecanoyl))hGLP-1(7-36)NH₂; | |
| (Ser⁸,Arg^{25,26,34},β-Ala³⁵,Lys³⁶(N^{ε}-decanoyl))hGLP-1(7-36)NH₂; | (SEQ ID NO.554) |
| (Ser⁸,Aib³⁵,Lys²⁶(N^{ε}-octanoyl),A6c³²,Arg³⁴)hGLP-1(7-36)NH₂; | (SEQ ID NO.555) |
| (Ser⁸,Aib³⁵,Lys²⁶(N^{ε}-tetradecanoyl),A6c³², | (SEQ ID NO.556) |
| Arg³⁴)hGLP-1(7-36)NH₂; | |
| (Ser⁸,Aib³⁵,Lys²⁶(N^{ε}-hexadecanoyl),A6c³²,Arg³⁴)hGLP-1(7-36)NH₂; | (SEQ ID NO.557) |
| (Ser⁸,Aib³⁵,A6c³²,Lys³⁴(N^{ε}-octanoyl))hGLP-1(7-36)NH₂; | (SEQ ID NO.558) |
| (Ser⁸,Aib³⁵,A6c³²,Lys³⁴(N^{ε}-tetradecanoyl))hGLP-1(7-36)NH₂; | (SEQ ID NO.559) |
| (Ser⁸,Aib³⁵,A6c³²,Lys³⁴(N^{ε}-hexadecanoyl))hGLP-1(7-36)NH₂; | (SEQ ID NO.560) |
| (Ser⁸,Aib³⁵,Arg²⁶,A6c³²,Lys³⁴(N^{ε}-octanoyl))hGLP-1(7-36)NH₂; | (SEQ ID NO.561) |
| (Ser⁸,Aib³⁵,Arg²⁶,A6c³²,Lys³⁴(N^{ε}- | (SEQ ID NO.562) |
| tetradecanoyl))hGLP-1(7-36)NH₂; | |
| (Ser⁸,Aib³⁵,A6c³²,Lys³⁶(N^{ε}-octanoyl))hGLP-1(7-36)NH₂; | (SEQ ID NO.563) |
| (Ser⁸,Aib³⁵,A6c³²,Lys³⁶(N^{ε}-tetradecanoyl))hGLP-1(7-36)NH₂; | (SEQ ID NO.564) |
| (Ser⁸,Aib³⁵,A6c³²,Lys³⁶(N^{ε}-hexadecanoyl))hGLP-1(7-36)NH₂; | (SEQ ID NO.565) |
| (Ser⁸,Aib³⁵,Arg²⁶,A6c³²,Lys³⁶(N^{ε}-octanoyl))hGLP-1(7-36)NH₂; | (SEQ ID NO.566) |
| (Ser⁸,Aib³⁵,Arg²⁶,A6c³²,Lys³⁶(N^{ε}- | (SEQ ID NO.567) |
| tetradecanoyl))hGLP-1(7-36)NH₂; | |
| (Ser⁸,Aib³⁵,Arg²⁶,A6c³²,Lys³⁶(N^{ε}- | (SEQ ID NO.568) |
| hexadecanoyl))hGLP-1(7-36)NH₂; | |
| (Ser⁸,Aib³⁵,Arg^{26,34},A6c³²,Lys³⁶(N^{ε}-octanoyl))hGLP-1(7-36)NH₂; | (SEQ ID NO.569) |
| (Ser⁸,Aib³⁵,Arg^{26,34},A6c³²,Lys³⁶(N^{ε}-decanoyl))hGLP-1(7-36)NH₂; | (SEQ ID NO.570) |
| (Ser⁸,Aib³⁵,Arg^{26,34},A6c³²,Lys³⁶(N^{ε}- | (SEQ ID NO.571) |
| tetradecanoyl))hGLP-1(7-36)NH₂; | |
| (Ser⁸,Aib³⁵,Arg^{26,34},A6c³²,Lys³⁶(N^{ε}- | (SEQ ID NO.572) |
| hexadecanoyl))hGLP-1(7-36)NH₂; | |
| (Ser⁸,Aib^{24,35},Lys²⁶(N^{ε}-octanoyl),Arg³⁴)hGLP-1(7-36)NH₂; | (SEQ ID NO.573) |
| (Ser⁸,Aib^{24,35},Lys²⁶(N^{ε}-tetradecanoyl),Arg³⁴)hGLP-1(7-36)NH₂; | (SEQ ID NO.574) |
| (Ser⁸,Aib^{24,35},Lys²⁶(N^{ε}-hexadecanoyl),Arg³⁴)hGLP-1(7-36)NH₂; | (SEQ ID NO.575) |
| (Ser⁸,Aib^{24,35},Arg²⁶,Lys³⁴(N^{ε}-octanoyl))hGLP-1(7-36)NH₂; | (SEQ ID NO.576) |
| (Ser⁸,Aib^{24,35},Arg²⁶,Lys³⁴(N^{ε}-tetradecanoyl))hGLP-1(7-36)NH₂; | (SEQ ID NO.577) |
| (Ser⁸,Aib^{24,35},Arg²⁶,Lys³⁴(N^{ε}-hexadecanoyl))hGLP-1(7-36)NH₂; | (SEQ ID NO.578) |
| (Ser⁸,Aib^{24,35},Arg^{26,34},Lys³⁶(N^{ε}-octanoyl))hGLP-1(7-36)NH₂; | (SEQ ID NO.579) |
| (Ser⁸,Aib^{24,35},Arg^{26,34},Lys³⁶(N^{ε}-tetradecanoyl))hGLP-1(7-36)NH₂; | (SEQ ID NO.580) |
| (Ser⁸,Aib^{24,35},Arg^{26,34},Lys³⁶(N^{ε}-hexadecanoyl))hGLP-1(7-36)NH₂; | (SEQ ID NO.581) |
| (Ser⁸,Aib^{24,35},Glu²³,A6c³²,Lys³⁴(N^{e}octanoyl))hGLP-1(7-36)NH₂; | (SEQ ID NO.582) |
| (Ser⁸,Aib³⁵,Glu²³,Lys²⁶(N^{ε}-octanoyl),Arg³⁴)hGLP-1(7-36)NH₂; | (SEQ ID NO.583) |
| (Ser⁸,Aib³⁵,Glu²³,Lys²⁶(N^{ε}-tetradecanoyl), | (SEQ ID NO.584) |
| Arg³⁴)hGLP-1(7-36)NH₂; | |
| (Ser⁸,Aib³⁵,Glu²³,Lys²⁶(N^{ε}-hexadecanoyl), | (SEQ ID NO.585) |
| Arg³⁴)hGLP-1(7-36)NH₂; | |
| (Ser⁸,Aib³⁵,Glu²³,Lys³⁴(N^{e}octanoyl))hGLp-1(7-36)NH₂; | (SEQ ID NO.586) |
| (Ser⁸,Aib³⁵,Glu²³,A6c³²,Lys³⁴(N^{e}octanoyl))hGLP-1(7-36)NH₂; | (SEQ ID NO.587) |
| (Ser⁸,Aib³⁵,Glu²³,Arg²⁶,Lys³⁴(N^{ε}-octanoyl))hGLP-1(7-36)NH₂; | (SEQ ID NO.588) |
| (Ser⁸,Aib³⁵,Glu²³,Arg²⁶,Lys³⁴(N^{ε}- | (SEQ ID NO.589) |
| tetradecanoyl))hGLP-1(7-36)NH₂; | |
| (Ser⁸,Aib³⁵,Glu²³,Arg²⁶,Lys³⁴(N^{ε}- | (SEQ ID NO.590) |
| hexadecanoyl))hGLP-1(7-36)NH₂; | |
| (Ser⁸,Aib³⁵,Glu²³,Lys³⁶(N^{ε}-octanoyl))hGLP-1(7-36)NH₂; | (SEQ ID NO.591) |
| (Ser⁸,Aib³⁵,Glu²³,Lys³⁶(N^{ε}-tetradecanoyl))hGLP-1(7-36)NH₂; | (SEQ ID NO.592) |
| (Ser⁸,Aib³⁵,Glu²³,Lys³⁶(N^{ε}-hexadecanoyl))hGLP-1(7-36)NH₂; | (SEQ ID NO.593) |
| (Ser⁸,Aib³⁵,Glu²³,Arg^{26,34},Lys³⁶(N^{ε}-octanoyl))hGLP-1(7-36)NH₂; | (SEQ ID NO.594) |
| (Ser⁸,Aib³⁵,Glu²³,Arg^{26,34},Lys³⁶(N^{ε}- | (SEQ ID NO.595) |
| tetradecanoyl))hGLP-1(7-36)NH₂; | |
| (Ser⁸,Aib³⁵,Glu²³,Arg^{26,34},Lys³⁶(N^{ε}- | (SEQ ID NO.596) |
| hexadecanoyl))hGLP-1(7-36)NH₂; | |
| (Ser⁸,Aib^{30,35},Lys²⁶(N^{ε}-octanoyl),Arg³⁴)hGLP-1(7-36)NH₂; | (SEQ ID NO.597) |
| (Ser⁸,Aib^{30,35},Lys²⁶(N^{ε}-tetradecanoyl),Arg³⁴)hGLP-1(7-36)NH₂; | (SEQ ID NO.598) |
| (Ser⁸,Aib^{30,35},Lys²⁶(N^{ε}-hexadecanoyl),Arg³⁴)hGLP-1(7-36)NH₂; | (SEQ ID NO.599) |
| (Ser⁸,Aib^{30,35},Arg²⁶,Lys³⁴(N^{ε}-octanoyl))hGLP-1(7-36)NH₂; | (SEQ ID NO.600) |
| (Ser⁸,Aib^{30,35},Arg²⁶,Lys³⁴(N^{ε}-tetradecanoyl))hGLP-1(7-36)NH₂; | (SEQ ID NO.601) |
| (Ser⁸,Aib^{30,35},Arg²⁶,Lys³⁴(N^{ε}-hexadecanoyl))hGLP-1(7-36)NH₂; | (SEQ ID NO.602) |
| (Ser⁸,Aib^{30,35},Arg^{26,34},Lys³⁶(N^{ε}-octanoyl))hGLP-1(7-36)NH₂; | (SEQ ID NO.603) |
| (Ser⁸,Aib^{30,35},Arg^{26,34},Lys³⁶(N^{ε}-tetradecanoyl))hGLP-1(7-36)NH₂; | (SEQ ID NO.604) |
| (Ser⁸,Aib^{30,35},Arg^{26,34},Lys³⁶(N^{ε}-hexadecanoyl))hGLP-1(7-3a)NH₂; | (SEQ ID NO.605) |
| (Ser⁸,Aib³⁵,Glu²³,A6c³²,Lys³⁶(N^{ε}-octanoyl))hGLP-1(7-36)NH₂; | (SEQ ID NO.606) |
| (Ser⁸,Aib³⁵,Glu²³,A6c³²,Lys³⁶(N^{ε}- | (SEQ ID NO.607) |
| tetradecanoyl))hGLP-1(7-36)NH₂; | |
| (Ser⁸,Aib³⁵,Glu²³,A6c³²,Lys³⁶(N^{ε}- | (SEQ ID NO.608) |
| hexadecanoyl)hGLP-1(7-36)NH₂; | |
| (Ser⁸,Aib³⁵,Glu²³,Arg^{26,34},A6c³²,Lys³⁶(N^{ε}- | (SEQ ID NO.609) |
| octanoyl))hGLP-1(7-36)NH₂; | |
| (Ser⁸,Aib³⁵,Glu²³,Arg^{26,34},A6c³²,Lys³⁶(N^{ε}- | (SEQ ID NO.610) |
| tetradecanoyl))hGLP-1(7-36)NH₂; | |
| (Ser⁸,Aib³⁵,Glu²³,Arg^{26,34},A6c³²,Lys³⁶(N^{ε}- | (SEQ ID NO.611) |
| hexadecanoyl))hGLP-1(7-36)NH₂; | |
| (Ser⁸,Aib^{24,35},Glu²³,Arg^{26,34},A6c³²,Lys³⁶(N^{ε}- | (SEQ ID NO.612) |
| octanoyl))hGLP-1(7-36)NH₂; | |
| (Ser⁸,Aib^{24,35},Glu²³,Arg^{26,34},A6c³²,Lys³⁶(N^{ε}- | (SEQ ID NO.613) |
| tetradecanoyl))hGLP-1(7-36)NH₂; | |
| (Ser⁸,Aib^{24,35},Glu²³,Arg^{26,34},A6c³²,Lys³⁶(N^{ε}- | (SEQ ID NO.614) |
| hexadecanoyl))hGLP-1(7-36)NH₂; | |
| (Ser⁸,Aib^{24,30,35},Glu²³,Arg^{26,34},A6c³²,Lys³⁶(N^{ε}- | (SEQ ID NO.615) |
| octanoyl))hGLP-1(7-36)NH₂; | |
| (Ser⁸,Aib^{24,30,35},Glu²³,Arg^{26,34},A6c³²,Lys³⁵(N^{ε}- | (SEQ ID NO.616) |
| tetradecanoyl))hGLP-1(7-36)NH₂; | |
| (Ser⁸,Aib^{24,30,35},Glu²³,Arg^{26,34},A6c³²,Lys³⁶(N^{ε}- | (SEQ ID NO.617) |
| hexadecanoyl))hGLP-1(7-36)NH₂; | |
| ((N^{α}-HEPES-His)⁷,Ser⁸,β-Ala³⁵)hGLP-1(7-36)NH₂; | (SEQ ID NO.618) |
| ((N^{α}-HEPA-His)⁷,Ser⁸,β-Ala³⁵)hGLP-1(7-36)NH₂; | (SEQ ID NO.619) |
| ((N^{α}-tetradecanoyl-His)⁷,Ser⁸,Aib³⁵)hGLP-1(7-36)NH₂; | (SEQ ID NO.620) |
| ((N^{α}-tetradecanoyl-His)⁷,Ser⁸,β-Ala³⁵)hGLP-1(7-36)NH₂; | (SEQ ID NO.621) |
| ((N^{α}-tetradecanoyl-His)⁷,Ser⁸,Aib³⁵,Arg^{26,34})hGLP-1(7-36)NH₂; | (SEQ ID NO.622) |
| ((N^{α}-tetradecanoyl-His)⁷,Ser⁸,Arg^{26,34},β-Ala³⁵)hGLP-1(7-36)NH₂; | (SEQ ID NO.623) |
| ((N^{α}-tetradecanoyl-His)⁷,Ser⁸,Aib³⁵,Arg^{25,26,34})hGLP-1(7-36)NH₂; | (SEQ ID NO.624) |
| ((N^{α}-tetradecanoyl-His)⁷,Ser⁸,Arg^{25,26,34},β- | (SEQ ID NO.625) |
| Ala³⁵)hGLP-1(7-36)NH₂; | |
| (Ser⁸,Aib³⁵,Lys²⁶(N^{ε}-octanesulfonyl),Arg³⁴)hGLP-1(7-36)NH₂; | (SEQ ID NO.626) |
| (Ser⁸,Aib³⁵,Lys²⁶(N^{ε}-dodecanesulfonyl),Arg³⁴)hGLP-1(7-36)NH₂; | (SEQ ID NO.627) |
| (Ser⁸,Aib³⁵,Lys²⁶(N^{ε}-hexadecanesulfonyl), | (SEQ ID NO.628) |
| Arg³⁴)hGLP-1(7-36)NH₂; | |
| (Ser⁸,Aib³⁵,Arg²⁶,Lys³⁴(N^{ε}-octanesulfonyl))hGLP-1(7-36)NH₂; | (SEQ ID NO.629) |
| (Ser⁸,Aib³⁵,Arg²⁶,Lys³⁴(N^{ε}-dodecanesulfonyl))hGLP-1(7-36)NH₂; | (SEQ ID NO.630) |
| (Ser⁸,Aib³⁵,Arg²⁶,Lys³⁴(N^{ε}-hexadecanesulfonyl)) | (SEQ ID NO.631) |
| hGLP-1(7-36)NH₂; | |
| (Ser⁸,Aib³⁵,Arg^{26,34},Lys³⁶(N^{ε}-octanesulfonyl))hGLP-1(7-36)NH₂; | (SEQ ID NO.632) |
| (Ser⁸,Aib³⁵,Arg^{26,34},Lys³⁶(N^{ε}- | (SEQ ID NO.633) |
| hexadecanesulfonyl))hGLP-1(7-36)NH₂; | |
| (Ser⁸,Aib³⁵,Asp²⁶(1-(4-decylpiperazine)),Arg³⁴)hGLP-1(7-36)NH₂; | (SEQ ID NO.634) |
| (Ser⁸,Aib³⁵,Asp²⁶(1-(4-dodecylpiperazine)), | (SEQ ID NO.635) |
| Arg³⁴)hGLP-1(7-36)NH₂; | |
| (Ser⁸,Aib³⁵,Asp²⁶(1 -(4-tetradecylpiperazine)), | (SEQ ID NO.636) |
| Arg³⁴)hGLP-1(7-36)NH₂; | |
| (Ser⁸,Aib³⁵,Asp²⁶(1 -(4-hexadecylpiperazine)), | (SEQ ID NO.637) |
| Arg³⁴)hGLP-1(7-36)NH₂; | |
| (Ser⁸,Aib³⁵,Arg²⁶,Asp³⁴(1-(4-decylpiperazine)))hGLP-1(7-36)NH₂; | (SEQ ID NO.638) |
| (Ser⁸,Aib³⁵,Arg²⁶,Asp³⁴(1-(4- | (SEQ ID NO.639) |
| dodecylpiperazine)))hGLP-1(7-36)NH₂; | |
| (Ser⁸,Aib³⁵,Arg²⁶1,Asp³⁴(1-(4- | (SEQ ID NO.640) |
| tetradecylpiperazine)))hGLP-1(7-36)NH₂; | |
| (Ser⁸,Aib³⁵,Arg²⁶,Asp³⁴(1-(4- | (SEQ ID NO.641) |
| hexadecylpiperazine)))hGLP-1(7-36)NH₂; | |
| (Ser⁸,Aib³⁵,Arg^{26,34},Asp³⁶(1-(4- | (SEQ ID NO.642) |
| decylpiperazine)))hGLP-1(7-36)NH₂; | |
| (Ser⁸,Aib³⁵,Arg^{26,34},Asp³⁶(1-(4- | (SEQ ID NO.643) |
| doclecylpiperazine)))hGLP-1(7-36)NH₂; | |
| (Ser⁸,Aib³⁵,Arg^{26,34},Asp³⁶(1-(4- | (SEQ ID NO.644) |
| hexadecylpiperazine)))hGLP-1(7-36)NH₂; | |
| (Ser⁸,Aib³⁵,Arg^{26,34},Asp³⁸(1-(4- | (SEQ ID NO.645) |
| decylpiperazine)))hGLP-1(7-38)NH₂; | |
| (Ser⁸,Aib³⁵,Arg^{26,34},Asp³⁸(1-(4- | (SEQ ID NO.646) |
| dodecylpiperazine)))hGLP-1(7-38)NH₂; | |
| (Ser⁸,Aib³⁵,Arg^{26,34},Asp³⁸(1-(4- | (SEQ ID NO.647) |
| tetradecylpiperazine)))hGLP-1(7-38)NH₂; | |
| (Ser⁸,Aib³⁵,Arg^{26,34},Asp³⁸(1-(4- | (SEQ ID NO.648) |
| hexadecylpiperazine)))hGLP-1(7-38)NH₂; | |
| (Ser⁸,Aib^{35,37},Arg^{26,34},Asp³⁸(1-(4- | (SEQ ID NO.649) |
| decylpiperazine)))hGLP-1(7-38)NH₂; | |
| (Ser⁸,Aib^{35,37},37,Arg^{26,34},Asp³⁸(1-(4- | (SEQ ID NO.650) |
| dodecylpiperazine)))hGLP-1(7-38)NH₂; | |
| (Ser⁸,Aib^{35,37},Arg^{26,34},Asp³⁸(1-(4- | (SEQ ID NO.651) |
| tetradecylpiperazine)))hGLP-1(7-38)NH₂; | |
| (Ser⁸,Aib^{35,37},Arg^{26,34},Asp³⁸(1-(4- | (SEQ ID NO.652) |
| hexadecylpiperazine)))hGLP-1(7-38)NH₂; | |
| (Ser⁸,Aib³⁵,Arg^{25,34},Asp²⁶(1-(4- | (SEQ ID NO.653) |
| decylpiperazine)))hGLP-1(7-36)NH₂; | |
| (Ser⁸,Aib³⁵,Arg^{25,34},Asp²⁶(1-(4- | (SEQ ID NO.654) |
| dodecylpiperazine)))hGLP-1(7-36)NH₂; | |
| (Ser⁸,Aib³⁵,Arg^{25,34},Asp²⁶(1-(4- | (SEQ ID NO.655) |
| tetradecylpiperazine)))hGLP-1(7-36)NH₂; | |
| (Ser⁸,Aib³⁵,Arg^{25,34},Asp²⁶(1-(4- | (SEQ ID NO.656) |
| hexadecylpiperazine)))hGLP-1(7-36)NH₂; | |
| (Ser⁸,Aib³⁵,Arg^{25,26},Asp³⁴(1-(4- | (SEQ ID NO.657) |
| decylpiperazine)))hGLP-1(7-36)NH₂; | |
| (Ser⁸,Aib³⁵,Arg^{25,26},Asp³⁴(1-(4- | (SEQ ID NO.658) |
| dodecylpiperazine)))hGLP-1(7-36)NH₂; | |
| (Ser⁸,Aib³⁵,Arg^{25,26},Asp³⁴(1-(4- | (SEQ ID NO.659) |
| tetradecylpiperazine)))hGLP-1(7-36)NH₂; | |
| (Ser⁸,Aib³⁵,Arg^{25,26},Asp³⁴(1-(4- | (SEQ ID NO.660) |
| hexadecylpiperazine)))hGLP-1(7-36)NH₂; | |
| (Ser⁸,Aib³⁵,Arg^{25,26,34},Asp³⁶(1-(4- | (SEQ ID NO.661) |
| decylpiperazine)))hGLP-1(7-36)NH₂; | |
| (Ser⁸,Aib³⁵,Arg^{25,26,34},Asp³⁶(1-(4- | (SEQ ID NO.662) |
| dodecylpiperazine)))hGLP-1(7-36)NH₂; | |
| (Ser⁸,Aib³⁵,Arg^{25,26,34},Asp³⁶(1-(4- | (SEQ ID NO.663) |
| tetradecylpiperazine)))hGLP-1(7-36)NH₂; | |
| (Ser⁸,Aib³⁵,Arg^{25,26,34},Asp³⁶(1-(4- | (SEQ ID NO.664) |
| hexadecylpiperazine)))hGLP-1(7-36)NH₂; | |
| (Ser⁸,Aib³⁵,Arg^{25,26,34},Asp³⁸(1-(4- | (SEQ ID NO.665) |
| decylpiperazine)))hGLP-1(7-38)NH₂; | |
| (Ser⁸,Aib³⁵,Arg^{25,26,34},Asp³⁸(1-(4- | (SEQ ID NO.666) |
| dodecylpiperazine)))hGLP-1(7-38)NH₂; | |
| (Ser⁸,Aib³⁵,Arg^{25,26,34},Asp³⁸(1-(4- | (SEQ ID NO.667) |
| tetradecylpiperazine)))hGLP-1(7-38)NH₂; | |
| (Ser⁸,Aib³⁵,Arg^{25,26,34},Asp³⁸(1-(4- | (SEQ ID NO.668) |
| hexadecylpiperazine)))hGLP-1(7-38)NH₂; | |
| (Ser⁸,Aib^{35,37},Arg^{25,26,34},Asp³⁸(1-(4- | (SEQ ID NO.669) |
| decylpiperazine)))hGLP-1(7-38)NH₂; | |
| (Ser⁸,Aib^{35,37},Arg^{25,26,34},Asp³⁸(1-(4- | (SEQ ID NO.670) |
| dodecyipiperazine)))hGLP-1(7-38)NH₂; | |
| (Ser⁸,Aib^{35,37},Arg^{25,26,34},Asp³⁸(1-(4- | (SEQ ID NO.671) |
| tetradecylpiperazine)))hGLP-1(7-38)NH₂; | |
| (Ser⁸,Aib^{35,37},Arg^{25,26,34},Asp³⁸(1-(4- | (SEQ ID NO.672) |
| hexadecylpiperazine)))hGLP-1(7-38)NH₂; | |
| (Ser⁸,Aib³⁵,Arg^{26,34},Glu³⁶(1-dodecylamino))hGLP-1(7-36)NH₂; | (SEQ ID NO.673) |
| (Ser⁸,Aib³⁵,Glu²⁶(1-dodecylamino),Arg³⁴)hGLP-1(7-36)NH₂; | (SEQ ID NO.674) |
| (Ser⁸,Aib³⁵,Arg²⁶,Glu³⁴(1-dodecylamino))hGLP-1(7-36)NH₂; | (SEQ ID NO.675) |
| (Ser⁸,Aib^{35,37},Arg^{26,34},Glu³⁸(1-dodecylamino))hGLP-1(7-38)NH₂; | (SEQ ID NO.676) |
| (Ser⁸,Aib³⁵,Arg³⁴,Lys²⁶(N^{ε}-(2-(4-decyl-1-piperazine)- | (SEQ ID NO.677) |
| acetyl)))hGLP-1(7-36)NH₂; | |
| (Ser⁸,Aib³⁵,Arg³⁴,Lys²⁶(N^{ε}-(2-(4-dodecyl-1-piperazine)- | (SEQ ID NO.678) |
| acetyl)))hGLP-1(7-36)NH₂; | |
| (Ser⁸,Aib³⁵,Arg³⁴,Lys²⁶(N^{ε}-(2-(4-tetradecyl-1-piperazine)- | (SEQ ID NO.679) |
| acetyl)))hGLP-1(7-36)NH₂; | |
| (Ser⁸,Aib³⁵,Arg³⁴,Lys²⁶(N^{ε}-(2-(4-hexadecyl-1-piperazine)- | (SEQ ID NO.680) |
| acetyl)))hGLP-1(7-36)NH₂; | |
| (Ser⁸,Aib³⁵,Arg²⁶,Lys³⁴(N^{ε}-(2-(4-decyl-1-piperazine)- | (SEQ ID NO.681) |
| acetyl)))hGLP-1(7-36)NH₂; | |
| (Ser⁸,Aib³⁵,Arg²⁶,Lys³⁴(N^{ε}-(2-(4-dodecyl-1-piperazine)- | (SEQ ID NO.682) |
| acetyl))hGLP-1(7-36)NH₂; | |
| (Ser⁸,Aib³⁵,Arg²⁶,Lys³⁴(N^{ε}-(2-(4-tetradecyl-1-piperazine)- | (SEQ ID NO.683) |
| acetyl)))hGLP-1(7-36)NH₂; | |
| (Ser⁸,Aib³⁵,Arg²⁶,Lys³⁴(N^{ε}-(2-(4-hexadecyl-1-piperazine) | (SEQ ID NO.684) |
| acetyl)))hGLP-1(7-36)NH₂; | |
| (Ser⁸,Aib³⁵,Arg^{26,34},Lys³⁶(N^{ε}-(2-(4-hexadecyl-1-piperazine)- | (SEQ ID NO.685) |
| acetyl)))hGLP-1(7-36)NH₂; | |
| (Ser⁸,Aib³⁵,Arg^{26,34},Lys³⁶(N^{ε}-(2-(4-dodecyl-1-piperazine)- | (SEQ ID NO.686) |
| acetyl)))hGLP-1(7-36)NH₂; | |
| (Ser⁸,Aib³⁵,Arg^{26,34},Lys³⁶(N^{ε}-(2-(4-hexadecyl-1-piperazine)- | (SEQ ID NO.687) |
| acetyl)))hGLP-1(7-36)NH₂; | |
| (Ser⁸,Aib³⁵,Arg^{26,34},Lys³⁸(N^{ε}-(2-(4-decyl-1-piperazine)- | (SEQ ID NO.688) |
| acetyl)))hGLP-1(7-38)NH₂; | |
| (Ser⁸,Aib³⁵,Arg^{26,34},Lys³⁸(N^{ε}-(2-(4-dodecyl-1-piperazine) | (SEQ ID NO.689) |
| acetyl)))hGLP-1(7-38)NH₂; | |
| (Ser⁸,Aib³⁵,Arg^{26,34},Lys³⁸(N^{ε}-(2-(4-tetradecyl-1-piperazine)- | (SEQ ID NO.690) |
| acetyl)))hGLP-1(7-38)NH₂; | |
| (Ser⁸,Aib³⁵,Arg^{26,34},Lys³⁸(N^{ε}-(2-(4-hexadecyl-1-piperazine)- | (SEQ ID NO.691) |
| acetyl)))hGLP-1(7-38)NH₂; | |
| (Ser⁸,Aib^{35,37},Arg^{26,34},Lys³⁸(N^{ε}-(2-(4-decyl-1-piperazine) | (SEQ ID NO.692) |
| acetyl)))hGLP-1(7-38)NH₂; | |
| (Ser⁸,Aib^{35,37},Arg^{26,34},Lys³⁸(N^{ε}-(2-(4-dodecyl-1-piperazine)- | (SEQ ID NO.693) |
| acetyl)))hGLP-1(7-38)NH₂; | |
| (Ser⁸,Aib^{35,37},Arg^{26,34},Lys³⁸(N^{ε}-(2-(4-tetradecyl-1-piperazine)- | (SEQ ID NO.694) |
| acetyl)))hGLP-1(7-38)NH₂; | |
| (Ser⁸,Aib^{35,37},Arg^{26,34},Lys³⁸(N^{ε}-(2-(4-hexadecyl-1-piperazine) | (SEQ ID NO.695) |
| acetyl)))hGLP-1(7-38)NH₂; | |
| (Ser⁸,Aib³⁵,Arg^{25,34},Lys²⁶(N^{ε}-(2-(4-decyl-1-piperazine)- | (SEQ ID NO.696) |
| acetyl)))hGLP-1(7-36)NH₂; | |
| (Ser⁸,Aib³⁵,Arg^{25,34},Lys²⁶(N^{ε}-(2-(4-dodecyl-1-piperazine)- | (SEQ ID NO.697) |
| acetyl)))hGLP-1(7-36)NH₂; | |
| (Ser⁸,Aib³⁵,Arg^{25,34},Lys²⁶(N^{ε}-(2-(4-tetradecyl-1-piperazine) | (SEQ ID NO.698) |
| acetyl)))hGLP-1(7-36)NH₂; | |
| (Ser⁸,Aib³⁵,Arg^{25,34},Lys²⁶(N^{ε}-(2-(4-hexadecyl-1-piperazine) | (SEQ ID NO.699) |
| acetyl)))hGLP-1(7-36)NH₂; | |
| (Ser⁸,Aib³⁵,Arg^{25,26},Lys³⁴(N^{ε}-(2-(4-decyl-1-piperazine)- | (SEQ ID NO.700) |
| acetyl)))hGLP-1(7-36)NH₂; | |
| (Ser⁸,Aib³⁵,Arg^{25,26},Lys³⁴(N^{ε}-(2-(4-dodecyl-1-piperazine)- | (SEQ ID NO.701) |
| acetyl)))hGLP-1(7-36)NH₂; | |
| (Ser⁸,Aib³⁵,Arg^{25,26},Lys³⁴(N^{ε}-(2-(4-tetradecyl-1-piperazine) | (SEQ ID NO.702) |
| acetyl)))hGLP-1(7-36)NH₂; | |
| (Ser⁸,Aib³⁵,Arg^{25,26},Lys³⁴(N^{ε}-(2-(4-hexadecyl-1-piperazine) | (SEQ ID NO.703) |
| acetyl)))hGLP-1(7-36)NH₂; | |
| (Ser⁸,Aib³⁵,Arg^{25,26,34},Lys³⁶(N^{ε}-(2-(4-decyl-1-piperazine) | (SEQ ID NO.704) |
| acetyl)))hGLP-1(7-36)NH₂; | |
| (Ser⁸,Aib³⁵,Arg^{25,26,34},Lys³⁶(N^{ε}-(2-(4-dodecyl-1-piperazine) | (SEQ ID NO.705) |
| acetyt)))hGLP-1(7-36)NH₂; | |
| (Ser⁸,Aib³⁵,Arg^{25,26,34},Lys³⁶(N^{ε}-(2-(4-tetradecyl-1-piperazine) | (SEQ ID NO.706) |
| acetyl)))hGLP-1(7-36)NH₂; | |
| (Ser⁸,Aib³⁵,Arg^{25,26,34},Lys³⁶(N^{ε}-(2-(4-hexadecyl-1-piperazine) | (SEQ ID NO.707) |
| acetyl)))hGLP-1(7-36)NH₂; | |
| (Ser⁸,Aib³⁵,Arg^{25,26,34},Lys³⁸(N^{ε}-(2-(4-decyl-1-piperazine)- | (SEQ ID NO.708) |
| acetyl)))hGLP-1(7-38)NH₂; | |
| (Ser⁸,Aib³⁵,Arg^{25,26,34},Lys³⁸(N^{ε}-(2-(4-dodecyl-1-piperazine)- | (SEQ ID NO.709) |
| acetyl)))hGLP-1(7-38)NH₂; | |
| (Ser⁸,Aib³⁵,Arg^{25,26,34},Lys³⁸(N^{ε}-(2-(4-tetradecyl-1-piperazine) | (SEQ ID NO.710) |
| acetyl)))hGLP-1(7-38)NH₂; | |
| (Ser⁸,Aib³⁵,Arg^{25,26,34},Lys³⁹(N^{ε}-(2-(4-hexadecyl-1-piperazine) | (SEQ ID NO.711) |
| acetyl)))hGLP-1(7-38)NH₂; | |
| (Ser⁸,Aib^{35,37},Arg^{25,26,34},Lys³⁸(N^{ε}-(2-(4-decyl-1-piperazine) | (SEQ ID NO.712) |
| acetyl)))hGLP-1(7-38)NH₂; | |
| (Ser⁸,Aib^{35,37},Arg^{25,26,34},Lys³⁸(N^{ε}-(2-(4-dodecyl-1-piperazine) | (SEQ ID NO.713) |
| acetyl)))hGLP-1(7-38)NH₂; | |
| (Ser⁸,Aib^{35,37},Arg^{25,26,34},Lys³⁸(N^{ε}-(2-(4-tetradecyl-1-piperazine)- | (SEQ ID NO.714) |
| acetyl)))hGLP-1(7-38)NH₂; | |
| (Ser⁸,Aib^{35,37},Arg^{25,26,34},Lys³⁸(N^{ε}-(2-(4-hexadecyl-1-piperazine) | (SEQ ID NO.715) |
| acetyl)))hGLP-1(7-38)NH₂; | |
| (Ser⁸,Aib³⁵,Arg^{26,34},Lys³⁶(N^{ε}-decanoyl))hGLP-1(7-36)OH; | (SEQ ID NO.716) |
| (Ser⁸,Aib³⁵,Lys²⁵,Arg^{26,34},Lys³⁶(N^{ε}-decanoyl))hGLP-1(7-36)OH; | (SEQ ID NO.717) |
| (Ser⁸,Aib³⁵,Arg^{26,34},Ava³⁷,Ado³⁸)hGLP-1(7-38)NH₂; | (SEQ ID NO.718) |
| (Ser⁸,Aib³⁵,Arg^{26,34},Asp³⁷,Ava³⁶,Ado³⁹)hGLP-1(7-39)NH₂; | (SEQ ID NO.719) |
| (Ser⁸,Aib³⁵,Arg^{26,34},Aun³⁷)hGLP-1(7-37)NH₂; | (SEQ ID NO.720) |
| (Ser⁸,Aib^{17,35})hGLP-1(7-36)NH₂; | (SEQ ID NO.721) |
| (Ser⁸,Arg^{26,34},β-Ala³⁵,D-Asp³⁷,Ava³⁸,Aun³⁹)hGLP-1(7-39)NH₂; | (SEQ ID NO.722) |
| (Ser⁸,Glu^{22,23},β-Ala³⁵)hGLP-1(7-36)NH₂; | (SEQ ID NO.723) |
| (Ser⁸,Lys¹⁸,β-Ala³⁵)hGLP-1(7-36)NH₂; | (SEQ ID NO.724) |
| (Ser⁸,Leu²⁷,β-Ala³⁵)hGLP-1(7-36)NH₂; | (SEQ ID NO.725) |
| (Ser⁸,Lys³³,β-Ala³⁵)hGLP-1(7-36)NH₂; | (SEQ ID NO.726) |
| (Ser⁸,Lys¹⁸,Leu²⁷,(β-Ala³⁵)hGLP-1(7-36)NH₂; | (SEQ ID NO.727) |
| (Ser⁸,D-Arg³⁶)hGLP-1(7-36)NH₂; | (SEQ ID NO.728) |
| (Ser⁸,β-Ala³⁵,D-Arg³⁷)hGLP-1(7-37)NH₂; | (SEQ ID NO.729) |
| (Ser⁸,Aib²⁷,β-Ala³⁵)hGLP-1(7-36)NH₂; | (SEQ ID NO.730) |
| (Ser⁸,Aib²⁷,β-Ala^{35,37},Arg³⁸)hGLP-1(7-38)NH₂; | (SEQ ID NO.731) |
| (Ser⁸,Aib²⁷,(β-Ala^{35,37},Arg^{38,39})hGLP-1(7-39)NH₂; | (SEQ ID NO.732) |
| (Ser⁸,Lys^{18,27},β-Ala³⁵)hGLP-1(7-36)NH₂; | (SEQ ID NO.733) |
| (Ser⁸,Lys²⁷,β-Ala³⁵)hGLP-1(7-36)NH₂; | (SEQ ID NO.734) |
| (Ser⁸,β-Ala³⁵,Arg³⁸)hGLP-1(7-38)NH₂; | (SEQ ID NO.735) |
| (Ser⁸,Arg^{26,34},β-Ala³⁵,)hGLP-1(7-36)NH₂; | (SEQ ID NO.736) |
| (Ser⁸,D-Arg³⁵)hGLP-1(7-36)NH₂; | (SEQ ID NO.737) |
| (Ser⁸,β-Ala³⁵,Arg³⁷)hGLP-1(7-37)NH₂; | (SEQ ID NO.738) |
| (Ser⁸,Phe³¹,β-Ala³⁵)hGLP-1(7-36)NH₂; | (SEQ ID NO.739) |
| (Ser⁸,Aib³⁵,Phe³¹)hGLP-1(7-36)NH₂; | (SEQ ID NO.740) |
| (Ser⁸,Aib³⁵,2-Nal³¹)hGLP-1(7-36)NH₂; | (SEQ ID NO.741) |
| (Ser⁸,Aib³⁵,2-Nal^{28,31})hGLP-1(7-36)NH₂; | (SEQ ID NO.742) |
| (Ser⁸,Aib³⁵,Arg^{26,34},2-Nal³¹)hGLP-1(7-36)NH₂; | (SEQ ID NO.743) |
| (Ser⁸,Aib³⁵,Arg^{26,34},Phe³¹)hGLP-1(7-36)NH₂; | (SEQ ID NO.744) |
| (Ser⁸,Aib³⁵,2-Nal^{19,31})hGLP-1(7-36)NH₂; | (SEQ ID NO.745) |
| (Ser⁸,Aib³⁵,2-Nal^{12,31})hGLP-1(7-36)NH₂; | (SEQ ID NO.746) |
| (Ser⁸,Aib³⁵,Lys³⁶(N^{ε}-decanoyl))hGLP-1(7-36)NH₂; | (SEQ ID NO.747) |
| (Ser⁸,Aib³⁵,Arg³⁴,Lys²⁶(N^{ε}-decanoyl))hGLP-1(7-36)NH₂; | (SEQ ID NO.748) |
| (Ser⁸,Aib³⁵,Arg^{26,34},Lys³⁶(N^{ε}-dodecanoyl))hGLP-1(7-36)NH₂; | (SEQ ID NO.749) |
| (Ser⁸,β-Ala³⁵,Ser³⁷(O-decanoyl))hGLP1(7-37)-NH₂; | (SEQ ID NO.750) |
| (Ser⁸,Aib²⁷,β-Ala^{35,37},Arg³⁸,Lys³⁹(N^{ε}-octanoyl))hGLP-1(7-39)NH₂; | (SEQ ID NO.751) |
| (Ser⁸,Arg^{26,34},β-Ala³⁵,Lys³⁷(N^{ε}-octanoyl))hGLP-1(7-37)NH₂; | (SEQ ID NO.752) |
| (Ser⁸,Arg^{26,34},β-Ala³⁵,Lys³⁷(N^{ε}-decanoyl))hGLP-1(7-37)NH₂; | (SEQ ID NO.753) |
| (Ser⁸,Arg^{26,34},β-Ala³⁵,Lys³⁷(N^{ε}-tetradecanoyl))hGLP-1(7-37)NH₂; | (SEQ ID NO.754) |
| (Ser⁸,Arg^{26,34},β-Ala³⁵,Lys³⁷(N^{ε}-dodecanoyl))hGLP-1(7-37)NH₂; | (SEQ ID NO.755) |
| (Ser⁸,Arg^{26,34},β-Ala³⁵,Lys³⁷(N^{ε}-dodecanoyl))hGLP-1(8-37)NH₂; | (SEQ ID NO.756) |
| (Ser⁸,Arg^{26,34},β-Ala³⁵,Lys³⁶(N^{ε}-Aec-decanoyl))hGLP-1(7-36)NH₂; | (SEQ ID NO.757) |
| (Ser⁸,Arg²⁶,Aib³⁵)hGLP-1(7-36)NH₂; | (SEQ ID NO.758) |
| (Ser⁸,Arg²⁶,Phe³¹,Aib³⁵)hGLP-1(7-36)NH₂; | (SEQ ID NO.759) |
| (Ser⁸,Arg²⁶,Phe³¹,β-Ala³⁵)hGLP-1(7-36)NH₂; | (SEQ ID NO.760) |
| (Ser⁸,Arg²⁶,β-Ala³⁵)hGLP-1(7-36)NH₂; | (SEQ ID NO.761) |
| (Ser⁸,Arg^{26,34},Phe³¹,β-Ala³⁵)hGLP-1(7-36)NH₂; | (SEQ ID NO.762) |
| (Ser⁸,Arg³⁴,Aib³⁵)hGLP-1(7-36)NH₂; | (SEQ ID NO.763) |
| (Ser⁸,Arg³⁴,β-Ala³⁵)hGLP-1(7-36)NH₂; | (SEQ ID NO.764) |
| (Ser⁸,Phe³¹,Arg³⁴,Aib³⁵)hGLP-1(7-36)NH₂; | (SEQ ID NO.765) |
| or | |
| (Ser⁸,Phe³¹,Arg³⁴,β-Ala³⁵)hGLP-1(7-36)NH₂; | (SEQ ID NO.766) |
| or | |
| a pharmaceutically acceptable salt thereof. | |

[0069] A preferred compound of the group of compounds described in paragraphs [068] through [0453] is a compound according to the formula:

| | |
|---|---|
| (Gly⁸,Aib³⁵,A6c³²)hGLP-1(7-36)NH₂; | (SEQ ID NO.8) |
| (Gly⁸,Aib³⁵,Glu²³)hGLP-1(7-36)NH₂; | (SEQ ID NO.10) |
| (Gly⁸,Aib^{24,35})hGLP-1(7-36)NH₂; | (SEQ ID NO.11) |
| (Gly⁸,Aib³⁵,Glu²³,A6c³²)hGLP-1(7-36)NH₂; | (SEQ ID NO.28) |
| (Gly⁸,Glu²³,β-Ala³⁵)hGLP-1(7-36)NH₂; | (SEQ ID NO.34) |
| (Gly⁸,Aib³⁵,Arg^{26,34})hGLP-1(7-36)NH₂; | (SEQ ID NO.59) |
| (Gly⁸,Aib³⁵,Arg^{26,34},Lys³⁶(N^{ε}-octanoyl))hGLP-1(7-36)NH₂; | (SEQ ID NO.117) |
| (Gly⁸,Aib³⁵,Arg^{26,34},Lys³⁶(N^{ε}-decanoyl))hGLP-1(7-36)OH; | (SEQ ID NO.332) |
| (Gly⁸,Aib³⁵,Lys²⁵,Arg^{26,34},Lys³⁶(N^{ε}-decanoyl))hGLP-1(7-36)OH; | (SEQ ID NO.333) |
| (Gly⁸,Arg^{26,34},β-Ala³⁵,Lys³⁶(N^{ε}-Aec-decanoyl))hGLP-1(7-36)NH₂; | (SEQ ID NO.383) |
| (Gly⁸,Aib³⁵,Arg25,34,Ava³⁷,Ado³⁸)hGLP-1(7-38)NH₂; | (SEQ ID NO.334) |
| (Gly⁸,Aib³⁵,Arg^{26,34},Asp³⁷,Ava³⁸,Ado³⁹)hGLP-1(7-39)NH₂; | (SEQ ID NO.335) |
| (Gly⁸,Aib³⁵,Arg^{26,34},Aun³⁷)hGLP-1(7-37)NH₂; | (SEQ ID NO.336) |
| (Gly⁸,Aib^{17,35})hGLP-1(7-36)NH₂; | (SEQ ID NO.337) |
| (Gly⁸,Arg^{26,34},β-Ala³⁵,D-Asp³⁷,Ava³⁸,Aun³⁹)hGLP-1(7-39)NH₂; | (SEQ ID NO.338) |
| (Gly⁸,Glu^{22,23},β-Ala³⁵)hGLP-1(7-36)NH₂; | (SEQ ID NO.339) |
| (Gly⁸.Lys¹⁸,β-Ala³⁵)hGLP-1(7-36)NH₂; | (SEQ ID NO.340) |
| (Gly⁸,Leu²⁷,β-Ala³⁵)hGLP-1(7-36)NH₂; | (SEQ ID NO.341) |
| (Gly⁸,Lys³³,β-Ala³⁵)hGLP-1(7-36)NH₂; | (SEQ ID NO.342) |
| (Gly⁸,Lys¹⁸,Leu²⁷,β-Ala³⁵)hGLP-1(7-36)NH₂; | (SEQ ID NO.343) |
| (Gly⁸,D-Arg³⁵)hGLP-1(7-36)NH₂; | (SEQ ID NO.344) |
| (Gly⁸,β-Ala³⁵,D-Arg³⁷)hGLP-1(7-37)NH₂; | (SEQ ID NO.345) |
| (Gly⁸,Aib²⁷,β-Ala³⁵)hGLP-1(7-36)NH₂; | (SEQ ID NO.346) |
| (Gly⁸,Aib²⁷,β-Ala^{35,37},Arg³⁸)hGLP-1(7-38)NH₂; | (SEQ ID NO.347) |
| (Gly⁸,Aib²⁷,β-Ala^{35,37},Arg^{38,39})hGLP-1(7-39)NH₂; | (SEQ ID NO.348) |
| (Gly⁸,Lys^{18,27},β-Ala³⁵)hGLP-1(7-36)NH₂; | (SEQ ID NO.349) |
| (Gly⁸,Lys²⁷,β-Ala³⁵)hGLP-1(7-36)NH₂; | (SEQ ID NO.350) |
| (Gly⁸,β-Ala³⁵,Arg³⁸)hGLP-1(7-38)NH₂; | (SEQ ID NO.351) |
| (Gly⁸,Arg^{26,34},β-Ala³⁵,)hGLP-1(7-36)NH₂; | (SEQ ID NO.352) |
| (Gly⁸,D-Arg³⁵)hGLP-1(7-36)NH₂; | (SEQ ID NO.353) |
| (Gly⁸,β-Ala³⁵,Arg³⁷)hGLP-1(7-37)NH₂; | (SEQ ID NO.354) |
| (Gly⁸,Phe³¹,β-Ala³⁵)hGLP-1(7-36)NH₂; | (SEQ ID NO.355) |
| (Gly⁸,Aib³⁵,Phe³¹)hGLP-1(7-36)NH₂; | (SEQ ID NO.356) |
| (Gly⁸,Aib³⁵,2-Nal³¹)hGLP-1(7-36)NH₂; | (SEQ ID NO.357) |
| (Gly⁸,Aib³⁵,2-Nal^{28,31})hGLP-1(7-36)NH₂; | (SEQ ID NO.358) |
| (Gly⁸,Aib³⁵,Arg^{26,34},2-Nal³¹)hGLP-1(7-36)NH₂; | (SEQ ID NO.359) |
| (Gly⁸,Aib³⁵,Arg^{26,34},Phe³¹)hGLP-1(7-36)NH₂; | (SEQ ID NO.360) |
| (Gly⁸,Aib³⁵,2-Nal^{19,31})hGLP-1(7-36)NH₂; | (SEQ ID NO.361) |
| (Gly⁸,Aib³⁵,2-Nal^{12,31})hGLP-1(7-36)NH₂; | (SEQ ID NO.362) |
| (Gly⁸,Aib³⁵,Lys³⁶(N^{ε}-decanoyl))hGLP-1(7-36)NH₂; | (SEQ ID NO.99) |
| (Gly⁸,Aib³⁵,Arg³⁴,Lys²⁶(N^{ε}-decanoyl))hGLP-1(7-36)NH₂; | (SEQ ID NO.364) |
| (Gly⁸,Aib³⁵,Arg^{26,34},Lys³⁶(N^{ε}-dodecanoyl))hGLP-1(7-36)NH₂; | (SEQ ID NO.365) |
| (Gly⁸,β-Ala³⁵,Ser³⁷(O-decanoyl))hGLP1(7-37)-NH₂; | (SEQ ID NO.384) |
| (Gly⁸,Aib²⁷,β-Ala^{35,37},Arg³⁸,Lys³⁹(N^{ε}-octanoyl))hGLP-1(7-39)NH₂; | (SEQ ID NO.367) |
| (Gly⁸,Arg^{26,34},β-Ala³⁵,Lys³⁷(N^{ε}-octanoyl))hGLP-1(7-37)NH₂; | (SEQ ID NO.368) |
| (Gly⁸,Arg^{26,34},β-Ala³⁵,Lys³⁷(N^{ε}-decanoyl))hGLP-1(7-37)NH₂; | (SEQ ID NO.369) |
| or | |
| (Gly⁸,Arg^{26,34},β-Ala³⁵,Lys³⁷(N^{ε}-tetradecanoyl))hGLP-1(7-37)NH₂; | (SEQ ID NO.370) |

or a pharmaceutically acceptable salt thereof.

[0070] A preferred compound of the group of compounds described in paragraphs [0455] through [0837] is a compound according to the formula:

| | |
|---|---|
| (Ser⁸,Aib³⁵,A6c³²)hGLP-1(7-36)NH₂; | (SEQ ID NO.392) |
| (Ser⁸,Aib³⁵,Glu²³)hGLP-1(7-36)NH₂; | (SEQ ID NO.394) |
| (Ser⁸,Aib^{24,35})hGLP-1(7-36)NH₂; | (SEQ ID NO.395) |
| (Ser⁸,Aib³⁵,Glu²³,A6c³²)hGLP-1(7-36)NH₂; | (SEQ ID NO.412) |
| (Ser⁸,Glu²³,β-Ala³⁵)hGLP-1(7-36)NH₂; | (SEQ ID NO.418) |
| (Ser⁸,Aib³⁵,Arg^{26,34})hGLP-1(7-36)NH₂; | (SEQ ID NO.443) |
| (Ser⁸,Aib³⁵,Arg^{26,34},Lys³⁶(N^{ε}-octanoyl))hGLP-1(7-36)NH₂; | (SEQ ID NO.501) |
| (Ser⁸,Aib³⁵,Arg^{26,34},Lys³⁶(N^{ε}-decanoyl))hGLP-1(7-36)OH: | (SEQ ID NO.716) |
| (Ser⁸,Aib³⁵,Lys²⁵,Arg^{26,34},Lys³⁶(N^{ε}-decanoyl))hGLP-1(7-36)OH; | (SEQ ID NO.717) |
| (Ser⁸,Arg^{26,34},β-Ala³⁵,Lys³⁶(NEAec-decanoyl))hGLP-1(7-36)NH₂; | (SEQ ID NO.757) |
| (Ser⁸,Aib³⁵,Arg^{26,34},Ava³⁷,Ado³⁸)hGLP-1(7-38)NH₂; | (SEQ ID NO.718) |
| (Ser⁸,Aib³⁵,Arg^{26,34},Asp³⁷,Ava³⁸,Ado³⁹)hGLP-1(7-39)NH₂; | (SEQ ID NO.719) |
| (Ser⁸,Aib³⁵,Arg^{26,34},Aun³⁷)hGLP-1(7-37)NH₂; | (SEQ ID NO.720) |
| (Ser⁸,Aib^{17,35})hGLP-1(7-36)NH₂; | (SEQ ID NO.389) |
| (Ser⁸,Arg^{26,34},β-Ala³⁵,D-Asp³⁷,Ava³⁸,Aun³⁹)hGLP-1(7-39)NH₂; | (SEQ ID NO.722) |
| (Ser⁸,Glu^{22,23},β-Ala³⁵)hGLP-1(7-36)NH₂; | (SEQ ID NO.723) |
| (Ser⁸,Lys¹⁸,β-Ala³⁵)hGLP-1(7-36)NH₂; | (SEQ ID NO.724) |
| (Ser⁸,Leu²⁷,β-Ala³⁵)hGLP-1(7-36)NH₂; | (SEQ ID NO.725) |
| (Ser⁸,Lys³³,β-Ala³⁵)hGLP-1(7-36)NH₂; | (SEQ ID NO.726) |
| (Ser⁸,Lys¹⁸,Leu²⁷,β-Ala³⁵)hGLP-1(7-36)NH₂; | (SEQ ID NO.727) |
| (Ser⁸,D-Arg³⁶)hGLP-1(7-36)NH₂; | (SEQ ID NO.728) |
| (Ser⁸,β-Ala³⁵,D-Arg³⁷)hGLP-1(7-37)NH₂; | (SEQ ID NO.729) |
| (Ser⁸,Aib²⁷,β-Ala³⁵)hGLP-1(7-36)NH₂; | (SEQ ID NO.730) |
| (Ser⁸,Aib²⁷,β-Ala^{35,37},Arg³⁸)hGLP-1(7-38)NH₂; | (SEQ ID NO.731) |
| (Ser⁸,Aib²⁷,β-Ala^{35,37},Arg^{38,39})hGLP-1(7-39)NH₂; | (SEQ ID NO.732) |
| (Ser⁸,Lys^{18,27},β-Ala³⁵)hGLP-1(7-36)NH₂; | (SEQ ID NO.733) |
| (Ser⁸,Lys²⁷,β-Ala³⁵)hGLP-1(7-36)NH₂; | (SEQ ID NO.734) |
| (Ser⁸,β-Ala³⁵,Arg³⁸)hGLP-1(7-38)NH₂; | (SEQ ID NO.735) |
| (Ser⁸,Arg^{26,34},β-Ala³⁵)hGLP-1(7-36)NH₂; | (SEQ ID NO.736) |
| (Ser⁸,D-Arg³⁵)hGLP-1(7-36)NH₂; | (SEQ ID NO.737) |
| (Ser⁸,β-Ala³⁵,Arg³⁷)hGLP-1(7-37)NH₂; | (SEQ ID NO.738) |
| (Ser⁸,Phe³¹,β-Ala³⁵)hGLP-1(7-36)NH₂; | (SEQ ID NO.739) |
| (Ser⁸,Aib³⁵,Phe³¹)hGLP-1(7-36)NH₂; | (SEQ ID NO.740) |
| (Ser⁸,Aib³⁵,2-Nal³¹)hGLP-1(7-36)NH₂; | (SEQ ID NO.741) |
| (Ser⁸,Aib³⁵,2-Nal^{28,31})hGLP-1(7-36)NH₂; | (SEQ ID NO.742) |
| (Ser⁸,Aib³⁵,Arg^{26,34},2-Nal1)hGLP-1(7-36)NH₂; | (SEQ ID NO.743) |
| (Ser⁸,Aib³⁵,Arg^{26,34},Phe³¹)hGLP-1(7-36)NH₂; | (SEQ ID NO.744) |
| (Ser⁸,Aib³⁵,2-Nal^{19,31})hGLP-1(7-36)NH₂; | (SEQ ID NO.745) |
| (Ser⁸,Aib³⁵,2-Nal^{12,31})hGLP-1(7-36)NH₂; | (SEQ ID NO.746) |
| (Ser⁸,Aib³⁵,Lys³⁶(N^{ε}-decanoyl))hGLP-1(7-36)NH₂; | (SEQ ID NO.483) |
| (Ser⁸,Aib³⁵,Arg³⁴,Lys²⁶(N^{ε}-decanoyl))hGLP-1(7-36)NH₂; | (SEQ ID NO.748) |
| (Ser⁸,Aib³⁵,Arg^{26,34},Lys³⁶(N^{ε}-dodecanoyl))hGLP-1(7-36)NH₂; | (SEQ ID NO.749) |
| (Ser⁸,β-Ala³⁵,Ser³⁷(O-decanoyl))hGLP1(7-37)-NH₂; | (SEQ ID NO.539) |
| (Ser⁸,Aib²⁷,(β-Ala^{35,37},Arg³⁸,Lys³⁹(N^{ε}- | (SEQ ID NO.751) |
| octanoyl))hGLP-1(7-39)NH₂; | |
| (Ser⁸,Arg^{26,34},β-Ala³⁵,Lys³⁷(N^{ε}-octanoyl))hGLP-1(7-37)NH₂; | (SEQ ID NO.752) |
| (Ser⁸,Arg^{26,34},β-Ala³⁵,Lys³⁷(N^{ε}-decanoyl))hGLP-1(7-37)NH₂; | (SEQ ID NO.753) |
| or | |
| (Ser⁸,Arg^{26,34},β-Ala³⁵,Lys³⁷(N^{ε}-tetradecanoyl)) | (SEQ ID NO.754) |
| hGLP-1(7-37)NH₂; | |

or a pharmaceutically acceptable salt thereof.

[0071] In a more preferred embodiment the invention features a compound according to formula (I), wherein said compound is:

| | |
|---|---|
| (Ser⁸,Aib³⁵)hGLP-1(7-36)NH₂; | (SEQ ID NO.767) |
| (Abu⁸,β-Ala³⁵)hGLP-1(7-36)NH₂; | (SEQ ID NO.768) |
| (Val⁸,β-Ala³⁵)hGLP-1(7-36)NH₂; | (SEQ ID NO.769) |
| (β-Ala^{8,35})hGLP-1(7-36)NH₂; | (SEQ ID NO.770) |
| (Abu⁸,Aib³⁵)hGLP-1(7-36)NH₂; | (SEQ ID NO.771) |
| (Val⁸,Aib³⁵)hGLP-1(7-36)NH₂; | (SEQ ID NO.772) |
| or | |
| (β-Ala⁸,Aib³⁵)hGLP-1(7-36)NH₂; | (SEQ ID NO.773) |

or a pharmaceutically acceptable salt thereof.

[0072] In a still more preferred embodiment the invention features a compound according to formula (I), wherein said compound is:

| | |
|---|---|
| (Ser⁸,Aib³⁵)hGLP-1(7-36)NH₂; | (SEQ ID NO.767) |
| (Abu⁸,β-Ala³⁵)hGLP-1(7-36)NH₂; | (SEQ ID NO.768) |
| or | |
| (Abu⁸,Aib³⁵)hGLP-1(7-36)NH₂; | (SEQ ID NO.771) |

or a pharmaceutically acceptable salt thereof.

[0073] In yet a still more preferred embodiment the invention features a compound according to formula (I), wherein said compound is:

| | |
|---|---|
| (Ser⁸,Aib³⁵)hGLP-1(7-36)NH₂; | (SEQ ID NO.767) |

or a pharmaceutically acceptable salt thereof.

[0074] In another aspect of the invention is featured a pharmaceutical composition comprising an effective amount of a compound according to formula (I), or a pharmaceutically acceptable salt thereof, and a pharmaceutically acceptable carrier or diluent.

[0075] In another aspect of the invention is featured a method of eliciting an agonist effect from a GLP-1 receptor in a subject in need thereof, said method comprising administering to said subject an effective amount of a compound according to formula (I) or a pharmaceutically acceptable salt thereof.

[0076] In another aspect of the invention is featured a method of treating a disease selected from the group consisting of Type I diabetes, Type II diabetes, obesity, glucagonomas, secretory disorders of the airway, metabolic disorder, arthritis, osteoporosis, central nervous system disease, restenosis and neurodegenerative disease, in a subject in need thereof, said method comprising administering to said subject an effective amount of a compound according to formula (I) or a pharmaceutically acceptable salt thereof. Preferably, said disease is Type I diabetes or Type II diabetes.

[0077] In a preferred embodiment of each of the aspects detailed in paragraphs [0953], [0955], and [09561 said compound according to formula (I) is a compound described in paragraph [060], [061], [062], [063], [063], [065], [066], [067], or [068], or a pharmaceutically acceptable salt thereof. More preferably said compound according to formula (I) is selected from among the compounds of Formula (I) that are specifically disclosed herein, or a pharmaceutically acceptable salt thereof. More preferably said compound according to formula (I) is selected from among the compounds disclosed in paragraphs [069] through [0452] or in paragraphs [0455] through [0836], or a pharmaceutically acceptable salt thereof. More preferably said compound according to formula (I) is selected from among the compounds disclosed in paragraphs [0839] through [0885] or in paragraphs [0888] through [0934], or a pharmaceutically acceptable salt thereof. Still more preferably said compound according to formula (I) is selected from among the compounds disclosed in paragraphs [0937] through [0943], or a pharmaceutically acceptable salt thereof. Still more preferably said compound according to formula (I) is selected from among the compounds disclosed in paragraphs [0946] through [0948], or a pharmaceutically acceptable salt thereof. In a most preferred embodiment said compound according to formula (I) is (Ser⁸, Aib³⁵)hGLP-1(7-36)NH₂ (SEQ ID NO.767), or a pharmaceutically acceptable salt thereof.

[0078] With the exception of the N-terminal amino acid, all abbreviations (e.g., Ala) of amino acids in this disclosure stand for the structure of —NH—CH(R)—CO—, wherein R is the side chain of an amino acid (e.g., CH₃ for Ala). For the N-terminal amino acid, the abbreviation stands for the structure of (R²R³)—N—CH(R)—CO—, wherein R is a side chain of an amino acid and R² and R³ are as defined above, except when A⁷ is Ura, Paa or Pta, in which case R² and R³ are not present since Ura, Paa and Pta are considered here as des-amino amino acids. Certain other abbreviations for amino acids are employed herein with the following meanings:
[0079] Abu α-aminobutyric acid;
[0080] Ado 12-aminododecanoic acid;
[0081] Aec 4-(2-aminoethyl)-1-carboxymethyl-piperazine, represented by the structure: [chemical structure]
[0082] Aib α-aminoisobutyric acid;
[0083] Aic 2-aminoindane-2-carboxylic acid;
[0084] β-Ala β-alanine;
[0085] Amp 4-amino-phenylalanine;
[0086] Aun 11-aminoundecanoic acid;
[0087] Ava 5-aminovaleric acid;
[0088] Cha cyclohexylalanine;
[0089] Gaba γ-aminobutyric acid;
[0090] hArg homoarginine;
[0091] HEPA 4-(2-hydroxyethyl)-1-piperazimyl acetic acid;
[0092] HEPES 4-(2-hydroxyethyl)-1-piperazine-ethane sulfonic acid;
[0093] N-Me-Ala N-methyl-alanine;
[0094] N-Me-Asp N-methyl-aspartic acid;
[0095] N-Me-Glu N-methyl-glutamic acid;
[0096] N-Me-Gly N-methyl-glycine;
[0097] N^{α}-Me-His N^{α}-methyl-histidine;
[0098] 1-Nal β-(1-naphthyl)alanine;
[0099] 2-Nal β-(2-naphthyl)alanine;
[0100] Nie norleucine;
[0101] Orn ornithine;
[0102] Paa trans-3-(3-pyridyl) acrylic acid;
[0103] 3-Pal β-(3-pyridinyl)alanine;
[0104] 4-Pal β-(4-pyridinyl)alanine;
[0105] Pta (4-pyridylthio) acetic acid;
[0106] Tle tert-butylglycine;
[0107] Tma-His N,N-tetramethylamidino-histidine;
[0108] Tba tert-butylalanine; and
[0109] Ura urocanic acid.

[0110] What is meant by Acc is an amino acid selected from the group of 1-amino-1-cyclopropanecarboxylic acid (A3c); 1-amino-1-cyclobutanecarboxylic acid (A4c); 1-amino-1-cyclopentanecarboxylic acid (A5c); 1-amino-1-cyclohexanecarboxylic acid (A6c); 1-amino-1-cycloheptanecarboxylic acid (A7c); 1-amino-1-cyclooctanecarboxylic acid (A8c); and 1-amino-1-cyclononanecarboxylic acid (A9c).

[0111] The terms hydroxyalkyl, hydroxyphenylalkyl, and hydroxynaphthylalkyl each denotes a moiety containing 1, 2, 3, or 4 hydroxy substituents.

[0112] The term COX⁵ stands for —C═O.X⁵. Examples of —C═O.X⁵ Include, but are not limited to, acetyl and phenylpropionyl.

[0113] What is meant by Lys(N^{ε}-alkanoyl) is represented by the following structure:

[chemical structure]

[0114] What is meant by Lys(N^{ε}-alkylsufonyl) is represented by the following structure:

[chemical structure]

[0115] What is meant by Lys(N^{ε}-(2-(4-alkyl-1-piperazine)-acetyl)) is represented by the following structure:

[chemical structure]

[0116] What is meant by Asp(1-(4-alkyl-piperazine)) is represented by the following structure:

[chemical structure]

[0117] What is meant by Asp(1-alkylamino) is represented by the following structure:

[chemical structure]

[0118] What is meant by Lys(N^{ε}-Aec-alkanoyl) is represented by the structure:

[chemical structure]

[0119] What is meant by Lys(N^{ε}-ace-alkanoyl) is represented by the structure:

[chemical structure]

[0120] What is meant by Ser(O-alkanoyl) is represented by the structure:

[chemical structure]

[0121] The variable n in the structure depicted for Lys(N^{ε}-alkanoyl), Lys(N^{ε}-alkylsulfonyl), Lys(N^{ε}-(2-(4-alkyl-1-piperazine)-acetyl)), Asp(1-(4-alkyl-piperazine)), Asp(1-alkylamino), Lys(N^{ε}-Aec-alkanoyl), (N^{ε}-ace-alkanoyl) and Ser(O-alkanoyl) is an integer from 1 through 30, inclusive.

[0122] The full names for other abbreviations used herein are as follows:
[0123] Boc t-butyloxycarbonyl;
[0124] 2BrZ 2-bromobenzyloxycarbonyl;
[0125] Bzl benzyl;
[0126] 2ClZ 2-chlorobenzyloxycarbonyl;
[0127] DCM dichloromethane;
[0128] DIEA diisopropylethylamine;
[0129] DMF dimethylformamide;
[0130] DNP 2,4-dinitrophenyl;
[0131] Fm formyl;
[0132] Fmoc 9-fluorenylmethoxycarbonyl;
[0133] HBTU 2-(1H-Benzotriazol-1-yl)-1,1,3,3-tetramethyl uronium hexafluorophosphate;
[0134] HF hydrogen fluoride;
[0135] HOAc acetic acid;
[0136] HOBt N-hydroxybenzotriazole;
[0137] OcHex O-cyclohexyl;
[0138] PAM resin 4-hydroxymethylphenylacetamidomethyl resin;
[0139] TFA trifluoroacetic acid;
[0140] Tos tosyl; and
[0141] Xan xanthyl.

[0142] The term “(C₁-C₃₀)hydrocarbon moiety” encompasses alkyl, alkenyl and alkynyl, and in the case of alkenyl and alkynyl there are C₂-C₃₀.

[0143] The term “halo” encompasses fluoro, chloro, bromo and iodo.

[0144] A peptide of this invention is also denoted herein by another format, e.g., (A5c⁸)hGLP-1(7-36)NH₂(SEQ ID NO.774), with the substituted amino acids from the natural sequence placed between the first set of parentheses (e.g., A5c⁸ for Ala⁸ in hGLP-1). The abbreviation GLP-1 means glucagon-like peptide-1; hGLP-1 means human glucagon-like peptide-1. The numbers between the parentheses following “hGLP-1” refer to the number of amino acids present in the peptide. For example, hGLP-1(7-36) (SEQ ID NO.775) denotes amino acids 7 through 36 of the peptide sequence for human GLP-1. The sequence for hGLP-1(7-37) (SEQ ID NO.776) is listed in Mojsov, S., Int. J. Peptide Protein Res,. 40, 1992, pp. 333-342. The designation “NH₂” in hGLP-1(7-36)NH₂ indicates that the C-terminus of the peptide is amidated. hGLP-1(7-36) (SEQ ID NO.775) means that the C-terminus is the free acid. In hGLP-1(7-38) (SEQ ID NO.777), residues in positions 37 and 38 are Gly and Arg, respectively.

### DETAILED DESCRIPTION

[0145] The peptides of this invention can be prepared by standard solid phase peptide synthesis. See, e.g., Stewart, J. M., et al., Solid Phase Synthesis (Pierce Chemical Co., 2d ed. 1984). The substituents R² and R³ of the above generic formula may be attached to the free amine of the N-terminal amino acid by standard methods known in the art. For example, alkyl groups, e.g., (C₁-C₃₀)alkyl, may be attached using reductive alkylation. Hydroxyalkyl groups, e.g., (C₁-C₃₀)hydroxyalkyl, may also be attached using reductive alkylation wherein the free hydroxy group is protected with a t-butyl ester. Acyl groups, e.g., COE¹, may be attached by coupling the free acid, e.g., E¹COOH, to the free amine of the N-terminal amino acid by mixing the completed resin with 3 molar equivalents of both the free acid and diisopropylcarbodiimide in methylene chloride for one hour. If the free acid contains a free hydroxy group, e.g., p-hydroxyphenylpropionic acid, then the coupling should be performed with an additional 3 molar equivalents of HOBT.

[0146] When R¹ is NH—X²—CH₂—CONH₂, (i.e., Z⁰=CONH₂), the synthesis of the peptide starts with BocHN—X²—CH₂—COOH which is coupled to the MBHA resin. If R¹ is NH—X²—CH₂—COOH, (i.e., Z⁰=COOH) the synthesis of the peptide starts with Boc-HN—X²—CH₂—COOH which is coupled to PAM resin. For this particular step, 4 molar equivalents of Boc-HN—X²—COOH, HBTU and HOBt and 10 molar equivalents of DIEA are used. The coupling time is about 8 hours.

[0147] The protected amino acid 1-(N-tert-butoxycarbonyl-amino)-1-cyclohexane-carboxylic acid (Boc-A6c-OH) was synthesized as follows. 19.1 g (0.133 mol) of 1-amino-1-cyclohexanecarboxylic acid (Acros Organics, Fisher Scientific, Pittsburgh, Pa.) was dissolved in 200 ml of dioxane and 100 ml of water. To this was added 67 ml of 2N NaOH and the solution was cooled in an ice-water bath. 32.0 g (0.147 mol) of di-tert-butyl-dicarbonate was added to the solution and the reaction mixture was stirred overnight at room temperature. Dioxane was then removed under reduced pressure and 200 ml of ethyl acetate was added to the remaining aqueous solution. The mixture was cooled in an ice-water bath and the pH of the aqueous layer was adjusted to about 3 by adding 4N HCl. The organic layer was separated and the aqueous layer was extracted with ethyl acetate (1×100 ml). The two organic layers were combined, washed with water (2×150 ml), dried over anhydrous MgSO₄, filtered, and concentrated to dryness under reduced pressure. The residue was recrystallized in ethyl acetate/hexanes to produce 9.2 g (0.0386 mol) of the purified product; i.e., a 29% yield from the starting material.

[0148] Boc-A5c-OH was synthesized in an analogous manner to that of Boc-A6c-OH. Other protected Acc amino acids can be prepared in an analogous manner by a person of ordinary skill in the art as enabled by the teachings herein.

[0149] In the synthesis of a GLP-1 analogue of this invention containing A5c, A6c, Aib, Boc-Lys(2CIZ)-OH and/or Boc-His(DNP)-OH, the coupling time is 2 hrs. for these residues and the residue immediately following them. Otherwise the coupling time is approximately 5 minutes. For the synthesis of (Tma-His⁷)hGLP-1(7-36)NH₂(SEQ ID NO.778), HBTU (2 mmol) and DIEA (1.0 ml) in 4 ml DMF are used to react with the N-terminal free amine of the peptide-resin in the last coupling reaction; the coupling time is about 2 hours.

[0150] The substituents R² and R³ of the above generic formula can be attached to the free amine of the N-terminal amino acid by standard methods known in the art. For example, alkyl groups, e.g., (C₁-C₃₀)alkyl, can be attached using reductive alkylation. Hydroxyalkyl groups, e.g., (C₁-C₃₀)hydroxyalkyl, can also be attached using reductive alkylation wherein the free hydroxy group is protected with a t-butyl ester. Acyl groups, e.g., COX¹, can be attached by coupling the free acid, e.g., X¹COOH, to the free amine of the N-terminal amino acid by mixing the completed resin with 3 molar equivalents of both the free acid and diisopropylcarbodiimide in methylene chloride for about one hour. If the free acid contains a free hydroxy group, e.g., p-hydroxyphenylpropionic acid, then the coupling should be performed with an additional 3 molar equivalents of HOBT.

[0151] A compound of the present invention can be tested for activity as a GLP-1 binding compound according to the following procedure.

Cell Culture:

[0152] RIN 5F rat insulinoma cells (ATCC-# CRL-2058, American Type Culture Collection, Manassas, Va.), expressing the GLP-1 receptor, were cultured in Dulbecco's modified Eagle's medium (DMEM) containing 10% fetal calf serum, and maintained at about 37° C. in a humidifed atmosphere of 5% CO₂/95% air.

Radioligand Binding:

[0153] Membranes were prepared for radioligand binding studies by homogenization of the RIN cells in 20 ml of ice-cold 50 mM Tris-HCl with a Brinkman Polytron (Westbury, N.Y.) (setting 6, 15 sec). The homogenates were washed twice by centrifugation (39,000 g/10 min), and the final pellets were resuspended in 50 mM Tris-HCl, containing 2.5 mM MgCl₂, 0.1 mg/ml bacitracin (Sigma Chemical, St. Louis, Mo.), and 0.1% BSA. For assay, aliquots (0.4 ml) were incubated with 0.05 nM (¹²⁵I)GLP-1(7-36) (˜2200 Ci/mmol, New England Nuclear, Boston, Mass.), with and without 0.05 ml of unlabeled competing test peptides. After a 100 min incubation (25° C.), the bound (¹²⁵I)GLP-1(7-36) (SEQ ID NO: 775) was separated from the free by rapid filtration through GF/C filters (Brandel, Gaithersburg, Md.), which had been previously soaked in 0.5% polyethyleneimine. The filters were then washed three times with 5 ml aliquots of ice-cold 50 mM Tris-HCl, and the bound radioactivity trapped on the filters was counted by gamma spectrometry (Wallac LKB, Gaithersburg, Md.). Specific binding was defined as the total (¹²⁵I)GLP-1(7-36) (SEQ ID NO: 775) bound minus that bound in the presence of 1000 nM GLP1(7-36) (Bachem, Torrence, Calif.).

[0154] The peptides of this invention can be provided in the form of pharmaceutically acceptable salts. Examples of such salts include, but are not limited to, those formed with organic acids (e.g., acetic, lactic, maleic, citric, malic, ascorbic, succinic, benzoic, methanesulfonic, toluenesulfonic, or pamoic acid), inorganic acids (e.g., hydrochloric acid, sulfuric acid, or phosphoric acid), and polymeric acids (e.g., tannic acid, carboxymethyl cellulose, polylactic, polyglycolic, or copolymers of polylactic-glycolic acids). A typical method of making a salt of a peptide of the present invention is well known in the art and can be accomplished by standard methods of salt exchange. Accordingly, the TFA salt of a peptide of the present invention (the TFA salt results from the purification of the peptide by using preparative HPLC, eluting with TFA containing buffer solutions) can be converted into another salt, such as an acetate salt by dissolving the peptide in a small amount of 0.25 N acetic acid aqueous solution. The resulting solution is applied to a semi-prep HPLC column (Zorbax, 300 SB, C-8). The column is eluted with (1) 0.1N ammonium acetate aqueous solution for 0.5 hrs., (2) 0.25N acetic acid aqueous solution for 0.5 hrs. and (3) a linear gradient (20% to 100% of solution B over 30 min.) at a flow rate of 4 m/min (solution A is 0.25N acetic acid aqueous solution; solution B is 0.25N acetic acid in acetonitrile/water, 80:20). The fractions containing the peptide are collected and lyophilized to dryness.

[0155] As is well known to those skilled in the art, the known and potential uses of GLP-1 is varied and multitudinous (See, Todd, J. F., et al., Clinical Science, 1998, 95, pp. 325-329; and Todd, J. F. et al., European Journal of Clinical Investigation, 1997, 27, pp.533-536). Thus, the administration of the compounds of this invention for purposes of eliciting an agonist effect can have the same effects and uses as GLP-1 itself. These varied uses of GLP-1 may be summarized as follows, treatment of: Type I diabetes, Type II diabetes, obesity, glucagonomas, secretory disorders of the airway, metabolic disorder, arthritis, osteoporosis, central nervous system diseases, restenosis, neurodegenerative diseases, renal failure, congestive heart failure, nephrotic syndrome, cirrhosis, pulmonary edema, hypertension, and disorders wherein the reduction of food intake is desired. GLP-1 analogues of the present invention that elicit an antagonist effect from a subject can be used for treating the following: hypoglycemia and malabsorption syndrome associated with gastroectomy or small bowel resection.

[0156] Accordingly, the present invention includes within its scope pharmaceutical compositions comprising, as an active ingredient, at least one of the compounds of formula (I) in association with a pharmaceutically acceptable carrier.

[0157] The dosage of active ingredient in the compositions of this invention may be varied; however, it is necessary that the amount of the active ingredient be such that a suitable dosage form is obtained. The selected dosage depends upon the desired therapeutic effect, on the route of administration, and on the duration of the treatment. In general, an effective dosage for the activities of this invention is in the range of 1×10⁻⁷ to 200 mg/kg/day, preferably 1×10⁻⁴ to 100 mg/kg/day, which can be administered as a single dose or divided into multiple doses.

[0158] The compounds of this invention can be administered by oral, parenteral (e.g., intramuscular, intraperitoneal, intravenous or subcutaneous injection, or implant), nasal, vaginal, rectal, sublingual or topical routes of administration and can be formulated with pharmaceutically acceptable carriers to provide dosage forms appropriate for each route of administration.

[0159] Solid dosage forms for oral administration include capsules, tablets, pills, powders and granules. In such solid dosage forms, the active compound is admixed with at least one inert pharmaceutically acceptable carrier such as sucrose, lactose, or starch. Such dosage forms can also comprise, as is normal practice, additional substances other than such inert diluents, e.g., lubricating agents such as magnesium stearate. In the case of capsules, tablets and pills, the dosage forms may also comprise buffering agents. Tablets and pills can additionally be prepared with enteric coatings.

[0160] Liquid dosage forms for oral administration include pharmaceutically acceptable emulsions, solutions, suspensions, syrups, the elixirs containing inert diluents commonly used in the art, such as water. Besides such inert diluents, compositions can also include adjuvants, such as wetting agents, emulsifying and suspending agents, and sweetening, flavoring and perfuming agents.

[0161] Preparations according to this invention for parenteral administration include sterile aqueous or non-aqueous solutions, suspensions, or emulsions. Examples of non-aqueous solvents or vehicles are propylene glycol, polyethylene glycol, vegetable oils, such as olive oil and corn oil, gelatin, and injectable organic esters such as ethyl oleate. Such dosage forms may also contain adjuvants such as preserving, wetting, emulsifying, and dispersing agents. They may be sterilized by, for example, filtration through a bacteria-retaining filter, by incorporating sterilizing agents into the compositions, by irradiating the compositions, or by heating the compositions. They can also be manufactured in the form of sterile solid compositions which can be dissolved in sterile water, or some other sterile injectable medium immediately before use.

[0162] Compositions for rectal or vaginal administration are preferably suppositories which may contain, in addition to the active substance, excipients such as coca butter or a suppository wax.

[0163] Compositions for nasal or sublingual administration are also prepared with standard excipients well known in the art.

[0164] Further, a compound of this invention can be administered in a sustained release composition such as those described in the following patents and patent applications. U.S. Pat. No. 5,672,659 teaches sustained release compositions comprising a bioactive agent and a polyester. U.S. Pat. No. 5,595,760 teaches sustained release compositions comprising a bioactive agent in a gelable form. U.S. application Ser. No. 08/929,363 filed Sep. 9, 1997, teaches polymeric sustained release compositions comprising a bioactive agent and chitosan. U.S. application Ser. No. 08/740,778 filed Nov. 1, 1996, teaches sustained release compositions comprising a bioactive agent and cyclodextrin. U.S. application Ser. No. 09/015,394 filed Jan. 29, 1998, teaches absorbable sustained release compositions of a bioactive agent. U.S. application Ser. No. 09/121,653 filed Jul. 23, 1998, teaches a process for making microparticles comprising a therapeutic agent such as a peptide in an oil-in-water process. U.S. application Ser. No. 09/131,472 filed Aug. 10, 1998, teaches complexes comprising a therapeutic agent such as a peptide and a phosphorylated polymer. U.S. application Ser. No. 09/184,413 filed Nov. 2, 1998, teaches complexes comprising a therapeutic agent such as a peptide and a polymer bearing a non-polymerizable lactone. The teachings of the foregoing patents and applications are incorporated herein by reference.

[0165] Unless defined otherwise, all technical and scientific terms used herein have the same meaning as commonly understood by one of ordinary skill in the art to which this invention belongs. Also, all publications, patent applications, patents and other references mentioned herein are incorporated by reference.

Synthesis:

[0166] The following example describes a synthetic method for making a peptide of the invention, which method is well-known to those skilled in the art of peptide synthesis. Where provided, the amounts of reagents are approximately those employed to carry out the synthesis on a 0.20 mmol scale. Other methods are also well known to those skilled in the art, thus the example is provided for the purpose of illustration only and is not meant to limit the scope of the present Invention in any manner.

[0167] A great variety of amino acids, with and without side-chain protection, are available from a number of commercial sources. For example, the following amino acids, wherein parentheses designate the side-chain protecting group, if present, are variously available from Bachem, Torrance, Calif.; Nova Biochem., LaJolla, Calif.; Chem-Impex International; Wood Dale, Ill.; and Synthetech, Inc. Albany, Oreg.: Boc-Ado-OH, Boc-Aib-OH, Boc-Ala-OH, Boc-βAla-OH, Boc-Arg(Tos)-OH, Boc-D-Arg(Tos)-OH, Boc-Asp(OcHex)-OH, Boc-D-Asp(OcHex)-OH, Boc-Aun-OH, Boc-Ava-OH, Boc-Gln-OH, Boc-Glu(OcHex)-OH, Boc-Gly-OH, Boc-His(DNP)-OH, Boc-Ile-OH, Boc-Leu-OH, Boc-Lys(2CIZ)-OH, Boc-Nal-OH, Boc-Phe-OH, Boc-Ser(Bzl)-OH, Boc-Thr(Bzl)-OH, Boc-Trp(Fm)-OH, Boc-Tyr(2BrZ)-OH, and Boc-Val-OH.

### EXAMPLE 1

### Synthesis of (Ser⁸, Aib³⁵)hGLP-1(7-36)NH₂

[0168] The title peptide may be synthesized on an Applied Biosystems (Foster City, Calif.) model 430A peptide synthesizer modified to do accelerated Boc-chemistry solid phase peptide synthesis. (See Schnolzer, et al., Int. J. Peptide Protein Res., 90:180 (1992).) 4-Methylbenzhydrylamine (MBHA) resin (Peninsula Laboratories, Belmont, Calif.) with the substitution of 0.91 mmol/g may be used. Boc amino acids (Bachem, Calif., Torrance, Calif.; Nova Biochem., LaJolla, Calif.) may be used, e.g., with the following side chain protection: Boc-Ala-OH, Boc-Arg(Tos)-OH, Boc-Asp(OcHex)-OH, Boc-Tyr(2BrZ)-OH, Boc-His(DNP)-OH, Boc-Val-OH, Boc-Leu-OH, Boc-Gly-OH, Boc-Gln-OH, Boc-Ile-OH, Boc-Lys(2CIZ)-OH, Boc-Thr(Bzl)-OH, Boc-Ser(Bzl)-OH, Boc-Phe-OH, Boc-Glu(OcHex)-OH and Boc-Trp(Fm)-OH. The Boc groups are removed by treatment with 100% TFA for 2×1 min. Boc amino acids (2.5 mmol) are pre-activated with HBTU (2.0 mmol) and DIEA (1.0 mL) in 4 mL of DMF and are coupled without prior neutralization of the peptide-resin TFA salt.

[0169] At the end of the assembly of the peptide chain, the resin is treated with a solution of 20% mercaptoethanol/10% DIEA in DMF for 2×30 min. to remove the DNP group on the His side chain. The N-terminal Boc group is then removed by treatment with 100% TFA for 2×2 min. After neutralization of the peptide-resin with 10% DIEA in DMF (1×1 min), the formyl group on the side chain of Trp is removed by treatment with a solution of 15% ethanolamine/15% water/70% DMF for 2×30 min. The peptide-resin is then washed with DMF and DCM and dried under reduced pressure. The final cleavage is performed by stirring the peptide-resin in 10 mL of HF containing 1 mL of anisole and dithiothreitol (24 mg) at 0° C. for approximately 75 min. HF is removed by a flow of nitrogen and the residue is then washed with ether (6×10 mL) and extracted with 4N HOAc (6×10 mL).

[0170] The peptide mixture in the aqueous extract is purified on reverse-phase preparative high pressure liquid chromatography (HPLC) using a reverse phase VYDAC® C₁₈ column (Nest Group, Southborough, Mass.). The column is eluted with a linear gradient (20% to 50% of solution B over 105 min.) at a flow rate of 10 mL/min (Solution A=water containing 0.1% TFA; Solution B=acetonitrile containing 0.1% of TFA). Fractions are collected and checked on analytical HPLC. Those fractions containing purified product are then combined and lyophilized to dryness. Electro-spray mass spectrometer (MS(ES)) analysis may be used to check the molecular weight of the final product.

### EXAMPLES 2-7

[0171] The following peptides may also be synthesized according to the procedure detailed in Example 1, substituting appropriate amino acids during peptide assembly.

| | |
|---|---|
| (Abu⁸,β-Ala³⁵)hGLP-1(7-36)NH₂; | (SEQ ID NO.768) |
| (Val⁸,β-Ala³⁵)hGLP-1(7-36)NH₂; | (SEQ ID NO.769) |
| (β-Ala^{8,35})hGLP-1(7-36)NH₂; | (SEQ ID NO.770) |
| (Abu⁸,Aib³⁵)hGLP-1(7-36)NH₂; | (SEQ ID NO.771) |
| (Val⁸,Aib³⁵)hGLP-1(7-36)NH₂; | (SEQ ID NO.772) |
| and | |
| (β-Ala⁸,Aib³⁵)hGLP-1(7-36)NH₂; | (SEQ ID NO.773) |

[0172] Each of the foregoing examples can be made according to the procedures described hereinabove, with appropriate substitutions in starting materials during peptide assembly.

### Other Embodiments

[0173] From the above description, one skilled in the art can easily ascertain the essential characteristics of the present invention, and without departing from the spirit and scope thereof, can make various changes and modifications of the invention to adapt it to various uses and conditions. Thus, other embodiments are also within the claims.

What is claimed is:

1. A compound of formula (I),
(R²R³)-A⁷⁻A⁸-A⁹-A¹⁰-A¹¹-A¹²-A¹³-A¹⁴-A¹⁵-A¹⁶-A¹⁷⁻A¹⁸-A¹⁹-A²⁰-A²¹-A²²-A²³-A²⁴A²⁵-A²⁶-A²⁷⁻A²⁸-A²⁹-A³⁰-A³¹-A³²-A³³-A³⁴-A³⁵-A³⁶-A³⁷⁻A³⁸-A³⁹-R¹, (I)
wherein:
A⁷ is L-His, Ura, Paa, Pta, Amp, Tma-His, des-amino-His, or deleted;
A³ is Abu, β-Ala, Ser, Gly or Val;
A⁹ is Glu, N-Me-Glu, N-Me-Asp or Asp;
A¹⁰ is Gly, Acc, β-Ala or Aib;
A¹¹ is Thr or Ser;
A¹² is Phe, Acc, Aic, Aib, 3-Pal, 4-Pal, 1-Nal, 2-Nal, Cha, Trp or X¹-Phe;
A¹³ is Thr or Ser;
A¹⁴ is Ser or Aib;
A¹⁵ is Asp or Glu;
A¹⁶ is Val, Acc, Aib, Leu, Ile, Tle, Nle, Abu, Ala or Cha;
A¹⁷ is Ser or Thr;
A¹⁸ is Ser or Thr;
A¹⁹ is Tyr, Cha, Phe, 3-Pal, 4-Pal, Acc, 1-Nal, 2-Nal, or X¹-Phe;
A²⁰ is Leu, Acc, Aib, Nle, Ile, Cha, Tle, Val, Phe or X¹-Phe;
A²¹ is Glu or Asp;
A²² is Gly, Acc, β-Ala, Glu or Aib;
A²³ is Gin, Asp, Asn or Glu;
A²⁴ is Ala, Aib, Val, Abu, Tle or Acc;
A²⁵ is Ala, Aib, Val, Abu, Tle, Acc, Lys, Arg, hArg, Orn, HN—CH((CH₂)ₙ—N(R¹⁰R¹¹))—C(O) or HN—CH((CH₂)ₑ—X³)—C(O);
A²⁶ is Lys, Arg, hArg, Orn, HN—CH((CH₂)ₙ—N(R¹⁰R¹¹))—C(O) or HN—CH((CH₂)ₑ—X³C(O);
A²⁷ is Glu, Asp, Leu, Aib or Lys;
A²⁸ is Phe, 3-Pal, 4-Pal, 1-Nal, 2-Nal, X¹-Phe, Aic, Acc, Aib, Cha or Trp;
A²⁹ is Ile, Acc, Aib, Leu, Nle, Cha, Tle, Val, Abu, Ala or Phe;
A³⁰ is Ala, Aib or Acc;
A³¹ is Trp, 1-Nal, 2-Nal, 3-Pal, 4-Pal, Phe, Acc, Aib or Cha;
A³² is Leu, Acc, Aib, Nle, Ile, Cha, Tle, Phe, X¹-Phe or Ala;
A³³ is Val, Acc, Aib, Leu, Ile, Tle, Nle, Cha, Ala, Phe, Abu, Lys or X¹-Phe;
A³⁴ is Lys, Arg, hArg, Orn, HN—CH((CH₂)ₙ—N(R¹⁰R¹¹))—C(O) or HN—CH((CH₂)ₑ—X³)—C(O);
A³⁵ is Gly, β-Ala, D-Ala, Gaba, Ava, HN—(CH₂)ₘ—C(O), Aib, Acc or a D-amino acid;
A³⁶ is L- or D-Arg, D- or L-Lys, D- or L-hArg, D- or L-Orn, HN—CH((CH₂)ₙ—N(R¹⁰R¹¹))—C(O), HN—CH((CH₂)ₑ—X³)—C(O) or deleted;
A³⁷ is Gly, β-Ala, Gaba, Ava, Aib, Acc, Ado, Arg, Asp, Aun, Aec, HN—(CH₂)ₘ—C(O), HN—CH((CH₂)ₙ—N(R¹⁰R¹¹))—C(O), HN—CH((CH₂)ₙ—O(R¹⁰))—C(O), a D-amino acid, or deleted;
A³⁸ is D- or L-Lys, D- or L-Arg, D- or L-hArg, D- or L-Orn, HN—CH((CH₂)ₙ—N(R¹⁰R¹¹))—C(O), HN—CH((CH₂)ₑ—X³)—C(O) Ava, Ado, Aec or deleted;
A³⁹ is D- or L-Lys, D- or L-Arg, HN—CH((CH₂)ₙ—N(R¹⁰R¹¹))—C(O), Ava, Ado, Aec, or Aun, or is deleted;
X¹ is, independently for each occurrence, selected from the group consisting of (C₁-C₆)alkyl, OH and halo;
R¹ is OH, NH₂, (C₁-C₃₀)alkoxy, or NH—X²—CH₂-Z⁰, wherein X² is a (C₁-C₁₂)hydrocarbon moiety, and Z⁰ is H, OH, CO₂H or CONH₂; [chemical structure]
or —C(O)—NHR¹², wherein X⁴ is, independently for each occurrence, —C(O)—, —NH—C(O)— or —CH₂—, and wherein f is, independently for each occurrence, an integer from 1 to 29 inclusive;
each of R² and R³ is independently selected from the group consisting of H, (C₁-C₃₀)alkyl, (C₂-C₃₀)alkenyl, phenyl(C₁-C₃₀)alkyl, naphthyl(C₁-C₃₀)alkyl, hydroxy(C₁-C₃₀)alkyl, hydroxy(C₂-C₃₀)alkenyl, hydroxyphenyl(C₁-C₃₀)alkyl, and hydroxynaphthyl(C₁-C₃₀)alkyl; or one of R² and R³ is (CH₃)₂—N—C═N(CH₃)₂, (C₁-C₃₀)acyl, (C₁-C₃₀)alkylsulfonyl, C(O)X⁵, [chemical structure]
wherein Y is H, OH or NH₂; r is 0 to 4; q is 0 to 4; and X⁵ is (C₁-C₃₀)alkyl, (C₂-C30)alkenyl, phenyl(C₁-C₃₀)alkyl, naphthyl(C₁-C₃₀)alkyl, hydroxy(C₁-C₃₀)alkyl, hydroxy(C₂-C₃₀)alkenyl, hydroxyphenyl(C₁-C₃₀)alkyl or hydroxynaphthyl(C₁-C₃₀)alkyl;
e is, independently for each occurrence, an integer from 1 to 4 inclusive;
m is, independently for each occurrence, an integer from 5 to 24 inclusive;
n is, independently for each occurrence, an integer from 1 to 5, inclusive;
each of R¹⁰ and R¹¹ is, independently for each occurrence, H, (C₁-C₃₀)alkyl, (C₁-C₃₀)acyl, (C₁-C₃₀)alkylsulfonyl, —C((NH)(NH₂)) or [chemical structure]
and R¹² and R¹³ each is, independently for each occurrence, (C₁-C₃₀)alkyl; provided that:
(i) said compound is not:
(Ser^{8,}β-Ala³⁵)hGLP-1(7-36)NH₂(SEQ ID NO: 779);
(Gly⁸, Aib³⁵)hGLP-1(7-36)NH₂(SEQ ID NO: 780); or
(Gly³, β-Ala³⁵)hGLP-1(7-36)NH₂(SEQ ID NO: 781);
(ii) when A⁷ is Ura, Paa or Pta, then R² and R³ are deleted; and
(iii) when R¹⁰ is (C₁-C₃₀)acyl, (C₁-C₃₀)alkylsulfonyl, —C((NH)(NH₂)) or [chemical structure]
then R¹¹ is H or (C₁-C₃₀)alkyl; or a pharmaceutically acceptable salt thereof.

2. A compound according to claim 1, wherein A¹¹ is Thr; A¹³ is Thr; A¹⁵ is Asp; A¹⁷ is Ser; A¹⁸ is Ser; A²¹ is Glu; A²³ is Gln or Glu; A²⁷ is Glu; and A³¹ is Trp; or a pharmaceutically acceptable salt thereof.

3. A compound according to claim 2, wherein A⁹ is Glu, N-Me-Glu or N-Me-Asp; A¹² is Phe, Acc or Aic; A¹⁶ is Val, Acc or Aib; A¹⁹ is Tyr; A²⁰ is Leu, Acc or Cha; A²⁴ is Ala, Aib or Acc; A² is Ala, Aib, Acc, Lys, Arg, hArg, Orn, HN—CH((CH₂)ₙ—N(R¹⁰R¹¹))—C(O) or HN—CH((CH₂)ₑ—X³)—C(O); A²⁸ is Phe; A²⁹ is Ile or Acc; A³⁰ is Ala or Aib; A³² is Leu, Acc or Cha; and A³³ is Val or Acc; or a pharmaceutically acceptable salt thereof.

4. A compound according to claim 3, wherein A¹⁰ is Gly; A¹² is Phe, A6c or A5c; A¹⁶ is Val, A6c or A5c; A²⁰ is Leu, A6c, A5c or Cha; A²² is Gly, β-Ala or Aib; A²⁴ is Ala or Aib; A²⁹ is Ile, A6c or A5c; A³² is Leu, A6c, A5c or Cha; A³³ is Val, A6c or A5c; A³⁵ is Aib, β-Ala, Ado, A6c, A5c or Gly; and A³⁷ is Gly, Aib, β-Ala, Ado, D-Ala or deleted; or a pharmaceutically acceptable salt thereof.

5. A compound according to claim 4, wherein X⁴ for each occurrence is —C(O)—; e for each occurrence is independently 1 or 2; and R¹ is OH or NH₂; or a pharmaceutically acceptable salt thereof.

6. A compound according to claim 5, wherein R² is H and R³ is (C₁-C₃₀)alkyl, (C₂-C₃₀)alkenyl, (C₁-C₃₀)acyl, (C₁-C₃₀)alkylsulfonyl, [chemical structure] [chemical structure]
or a pharmaceutically acceptable salt thereof.

7. A compound according to claim 5, wherein R¹⁰ is (C₁-C₃₀)acyl, (C₁-C₃₀)alkylsulfonyl or [chemical structure]
and R¹¹ is H; or a pharmaceutically acceptable salt thereof

8. A compound according to claim 7, wherein R¹⁰ is (C₄-C₂₀)acyl, (C₄-C₂₀)alkylsulfonyl or [chemical structure]
or a pharmaceutically acceptable salt thereof.

9. A compound according to claim 5, wherein A⁸ is Gly, Ser, or Val; or a pharmaceutically acceptable salt thereof.

10. A compound according to claim 9 wherein A⁸ is Gly or Ser; or a pharmaceutically acceptable salt thereof.

11. A compound according to claim 10, wherein said compound is according to the formula:

| | |
|---|---|
| ((N^{α}-Me-His)⁷,Gly⁸,Aib³⁵)hGLP-1(7-36)NH₂; | (SEQ ID NO.1) |
| ((N^{α}-Me-His)⁷,Gly⁸,β-Ala³⁵)hGLP-1(7-36)NH₂; | (SEQ ID NO.2) |
| ((N^{α}-Me-His)⁷,Gly⁸,Aib³⁵,Arg^{26,34})hGLP-1(7-36)NH₂; | (SEQ ID NO.3) |
| ((N^{α}-Me-His)⁷,Gly⁸,Arg^{26,34},β-Ala³⁵)hGLP-1(7-36)NH₂; | (SEQ ID NO.4) |
| (Gly⁸,A6c³⁵)hGLP-1(7-36)NH₂; | (SEQ ID NO.5) |
| (Gly⁸,A5c³⁵)hGLP-1(7-36)NH₂: | (SEQ ID NO.6) |
| (Gly⁸,D-Ala³⁵)hGLP-1(7-36)NH₂; (SEQ ID NO.7) | |
| (Gly⁸,Aib³⁵,A6c³²)hGLP-1(7-36)NH₂; | (SEQ ID NO.8) |
| (Gly⁸,Aib³⁵,A5c³²)hGLP-1(7-36)NH₂; | (SEQ ID NO.9) |
| (Gly⁸,Aib³⁵,Glu²³)hGLP-1(7-36)NH₂; | (SEQ ID NO.10) |
| (Gly⁸,Aib^{24,35})hGLP-1(7-36)NH₂; | (SEQ ID NO.11) |
| (Gly⁸,Aib^{30,35})hGLP-1(7-36)NH₂; | (SEQ ID NO.12) |
| (Gly⁸,Aib^{25,35})hGLP-1(7-36)NH₂; | (SEQ ID NO.13) |
| (Gly⁸,Aib³⁵,A6c^{16,20})hGLP-1(7-36)NH₂; | (SEQ ID NO.14) |
| (Gly⁸,Aib³⁵,A6c^{16,29,32})hGLP-1(7-36)NH₂; | (SEQ ID NO.15) |
| (Gly⁸,Aib³⁵,A6c^{20,32})hGLP-1(7-36)NH₂; | (SEQ ID NO.16) |
| (Gly⁸,Aib³⁵,A6c²⁰)hGLP-1(7-36)NH₂; | (SEQ ID NO.17) |
| (Gly⁸,Aib³⁵,Lys²⁵)hGLP-1(7-36)NH₂; | (SEQ ID NO.18) |
| (Gly⁸,Aib^{24,35},A6c²⁰)hGLP-1(7-36)NH₂; | (SEQ ID NO.19) |
| (Gly⁸,Aib³⁵,A6c^{29,32})hGLP-1(7-36)NH₂; | (SEQ ID NO.20) |
| (Gly⁸,Aib^{24,35},A6c^{29,32})hGLP-1(7-36)NH₂; | (SEQ ID NO.21) |
| (Gly⁸,Aib³⁵,A6c¹²)hGLP-1(7-36)NH₂; | (SEQ ID NO.22) |
| (Gly⁸,Aib³⁵,Cha²⁰)hGLP-1(7-36)NH₂; | (SEQ ID NO.23) |
| (Gly⁸,Aib³⁵,A6c³³)hGLP-1(7-36)NH₂; | (SEQ ID NO.24) |
| (Gly⁸,A6c^{16,20},β-Ala³⁵)hGLP-1(7-36)NH₂; | (SEQ ID NO.25) |
| (Gly⁸,Aib³⁵,β-Ala²²)hGLP-1(7-36)NH₂; | (SEQ ID NO.26) |
| (Gly⁸,Aib^{22,35})hGLP-1(7-36)NH₂; | (SEQ ID NO.27) |
| (Gly⁸,Aib³⁵,Glu²³,A6c³²)hGLP-1(7-36)NH₂; | (SEQ ID NO.28) |
| (Gly⁸,Aib^{24,35},Glu²³,A6c³²)hGLP-1(7-36)NH₂; | (SEQ ID NO.29) |
| (Gly⁸,Aib^{24,25,35},Glu²³,A6c³²)hGLP-1(7-36)NH₂; | (SEQ ID NO.30) |
| (Gly⁸,Aib^{24,25,35},A6c^{16,20,32},Glu²³)hGLP-1(7-36)NH₂; | (SEQ ID NO.31) |
| (Gly⁸,A6c³²,β-Ala³⁵)hGLP-1(7-36)NH₂; | (SEQ ID NO.32) |
| (Gly⁸,A5c³²,β-Ala³⁵)hGLP-1(7-36)NH₂; | (SEQ ID NO.33) |
| (Gly⁸,Glu²³,β-Ala³⁵)hGLP-1(7-36)NH₂; | (SEQ ID NO.34) |
| (Gly⁸,Aib²⁴,β-Ala³⁵)hGLP-1(7-36)NH₂; | (SEQ ID NO.35) |
| (Gly⁸,Aib³⁰,β-Ala³⁵)hGLP-1(7-36)NH₂; | (SEQ ID NO.36) |
| (Gly⁸,Aib²⁵,β-Ala³⁵)hGLP-1(7-36)NH₂; | (SEQ ID NO.37) |
| (Gly⁸,A6c^{16,29,32},β-Ala³⁵)hGLP-1(7-36)NH₂; | (SEQ ID NO.38) |
| (Gly⁸,A6c^{20,32},β-Ala³⁵)hGLP-1(7-36)NH₂; | (SEQ ID NO.39) |
| (Gly⁸,A6c²⁰,β-Ala³⁵)hGLP-1(7-36)NH₂; | (SEQ ID NO.40) |
| (Gly⁸,Lys²⁵,β-Ala³⁵)hGLP-1(7-36)NH₂; | (SEQ ID NO.41) |
| (Gly⁸,Aib²⁴,A6c²⁰,β-Ala³⁵)hGLP-1(7-36)NH₂; | (SEQ ID NO.42) |
| (Gly⁸,A6c^{29,32},β-Ala³⁵)hGLP-1(7-36)NH₂; | (SEQ ID NO.43) |
| (Gly⁸,Aib²⁴,A6c^{29,32},β-Ala³⁵)hGLP-1(7-36)NH₂; | (SEQ ID NO.44) |
| (Gly⁸,A6c¹²,β-Ala³⁵)hGLP-1(7-36)NH₂; | (SEQ ID NO.45) |
| (Gly⁸,Cha²⁰,β-Ala³⁵)hGLP-1(7-36)NH₂; | (SEQ ID NO.46) |
| (Gly⁸,A6c³³,β-Ala³⁵)hGLP-1(7-36)NH₂; | (SEQ ID NO.47) |
| (Gly⁸,β-Ala^{22,35})hGLP-1(7-36)NH₂; | (SEQ ID NO.48) |
| (Gly⁸,Aib²²,β-Ala³⁵)hGLP-1(7-36)NH₂; | (SEQ ID NO.49) |
| (Gly⁸,Glu²³,A6c³²,β-Ala³⁵)hGLP-1(7-36)NH₂; | (SEQ ID NO.50) |
| (Gly⁸,Aib²⁴,Glu²³,A6c³²,β-Ala³⁵)hGLP-1(7-36)NH₂; | (SEQ ID NO.51) |
| (Gly⁸,Aib²⁴,Glu²³,A6c³²,Lys³⁴(N^{e}-octanoyl),β-Ala³⁵) | (SEQ ID NO.52) |
| hGLP-1(7-36)NH₂; | |
| (Gly⁸,Aib^{24,25},Glu²³,A6c³²,β-Ala³⁵)hGLP-1(7-36)NH₂; | (SEQ ID NO.53) |
| (Gly⁸,Aib^{24,25},A6c^{16,20,32},Glu²³,β-Ala³⁵)hGLP-1(7-36)NH₂; | (SEQ ID NO.54) |
| (Gly⁸,Aib³⁵,D-Arg³⁶)hGLP-1(7-36)NH₂; | (SEQ ID NO.55) |
| (Gly⁸,Aib³⁵,D-Lys³⁶)hGLP-1(7-36)NH₂; | (SEQ ID NO.56) |
| (Gly⁸,β-Ala³⁵,D-Arg³⁶)hGLP-1(7-36)NH₂; | (SEQ ID NO.57) |
| (Gly⁸,β-Ala³⁵,D-Lys³⁶)hGLP-1(7-36)NH₂; | (SEQ ID NO.58) |
| (Gly⁸,Aib³⁵,Arg^{26,34})hGLP-1(7-36)NH₂; | (SEQ ID NO.59) |
| (Gly⁸,Arg^{26,34},β-Ala³⁵)hGLP-1(7-36)NH₂; | (SEQ ID NO.60) |
| (Gly⁸,Aib³⁵,Arg^{25,26,34})hGLP-1(7-36)NH₂; | (SEQ ID NO.61) |
| (Gly⁸,Arg^{25,26,34},β-Ala³⁵)hGLP-1(7-36)NH₂; | (SEQ ID NO.62) |
| (Gly⁸,Arg^{26,34},β-Ala³⁵,Lys³⁶(N^{ε}-tetradecanoyl))hGLP-1(7-36)OH; | (SEQ ID NO.63) |
| (Gly⁸,Aib³⁵,Arg^{26,34},Lys³⁶(N^{ε}-tetradecanoyl))hGLP-1(7-37)OH; | (SEQ ID NO.64) |
| (Gly⁸,Aib^{35,37},Arg^{26,34},Lys³⁶(N^{ε}-tetradecanoyl))hGLP-1(7-37)OH; | (SEQ ID NO.65) |
| (Gly⁸,Aib³⁵,Arg^{26,34},Lys³⁸(N^{ε}-tetradecanoyl),D-Ala³⁷) | (SEQ ID NO.66) |
| hGLP-1(7-37)OH; | |
| (Gly⁸,Aib^{35,37},Arg^{26,34},Lys³⁸(N^{ε}-tetradecanoyl))hGLP-1(7-38)OH; | (SEQ ID NO.67) |
| (Gly⁸,Aib³⁵,Arg^{26,34},β-Ala³⁷,Lys³⁸(N^{ε}-tetradecanoyl)) | (SEQ ID NO.68) |
| hGLP-1(7-38)OH; | |
| (Gly⁸,Aib³⁵,Arg^{26,34},Lys³⁹(N^{ε}-tetradecanoyl))hGLP-1(7-38)OH; | (SEQ ID NO.69) |
| (Gly⁸,Arg^{26,34},Lys³⁶(N^{ε}-tetradecanoyl),β-Ala³⁷)hGLP-1(7-37)OH; | (SEQ ID NO.70) |
| (Gly⁸,Aib³⁷,Arg^{26,34},Lys³⁶(N^{ε}-tetradecanoyl))hGLP-1(7-37)OH; | (SEQ ID NO.71) |
| (Gly⁸,Aib³⁵,Arg^{26,34},Ado³⁷)hGLP-1(7-37)OH; | (SEQ ID NO.72) |
| (Gly⁸,Aib³⁵,Arg^{26,34},Ado³⁷)hGLP-1(7-37)NH₂; | (SEQ ID NO.73) |
| (Gly⁸,Arg^{26,34},Lys³⁶(N^{ε}-tetradecanoyl),D-Ala³⁷)hGLP-1(7-37)OH; | (SEQ ID NO.74) |
| (Gly⁸,Aib³⁷,Arg^{26,34},Lys³⁸(N^{ε}-tetradecanoyl))hGLP-1(7-38)OH; | (SEQ ID NO.75) |
| (Gly⁸,Arg^{26,34},β-Ala³⁷,Lys³⁸(N^{ε}-tetradecanoyl))hGLP-1(7-38)OH; | (SEQ ID NO.76) |
| (Gly⁸,Aib³⁵,Lys²⁶(N^{ε}-octanoyl))hGLP-1(7-36)NH₂; | (SEQ ID NO.77) |
| (Gly⁸,Aib³⁵,Lys²⁶(N^{ε}-tetradecanoyl))hGLP-1(7-36)NH₂; | (SEQ ID NO.78) |
| (Gly⁸,Aib³⁵,Lys²⁶(N^{ε}-hexadecanoyl))hGLP-1(7-36)NH₂; | (SEQ ID NO.79) |
| (Gly⁸,Lys²⁶(N^{ε}-octanoyl),β-Ala³⁵)hGLP-1(7-36)NH₂; | (SEQ ID NO.80) |
| (Gly⁸,Lys²⁶(N^{ε}-tetradecanoyl),β-Ala³⁵)hGLP-1(7-36)NH₂; | (SEQ ID NO.81) |
| (Gly⁸,Lys²⁶(N^{ε}-hexadecanoyl),β-Ala³⁵)hGLP-1(7-36)NH₂; | (SEQ ID NO.82) |
| (Gly⁸,Aib³⁵,Lys²⁶(N^{ε}-octanoyl),Arg³⁴)hGLP-1(7-36)NH₂; | (SEQ ID NO.83) |
| (Gly⁸,Aib³⁵,Lys²⁶(N^{ε}-tetradecanoyl),Arg³⁴)hGLP-1(7-36)NH₂; | (SEQ ID NO.84) |
| (Gly⁸,Aib³⁵,Lys²⁶(N^{ε}-hexadecanoyl),Arg³⁴)hGLP-1(7-36)NH₂; | (SEQ ID NO.85) |
| (Gly⁸,Aib³⁵,Lys²⁶(N^{ε}-decanoyl),Arg³⁴)hGLP-1(7-36)NH₂; | (SEQ ID NO.86) |
| (Gly⁸,Aib³⁵,Lys²⁵,Lys²⁶(N^{ε}-octanoyl),Arg³⁴)hGLP-1(7-36)NH₂; | (SEQ ID NO.87) |
| (Gly⁸,Aib³⁵,Lys²⁵,Lys²⁶(N^{ε}-tetradecanoyl),Arg³⁴)hGLP-1(7-36)NH₂; | (SEQ ID NO.88) |
| (Gly⁸,Aib³⁵,Lys²⁵,Lys²⁶(N^{ε}-hexadecanoyl),Arg³⁴)hGLP-1(7-36)NH₂; | (SEQ ID NO.89) |
| (Gly⁸,Aib³⁵,Arg^{25,34},Lys²⁶(N^{ε}-octanoyl))hGLP-1(7-36)NH₂; | (SEQ ID NO.90) |
| (Gly⁸,Aib³⁵,Arg^{25,34},Lys²⁶(N^{ε}-tetradecanoyl))hGLP-1(7-36)NH₂; | (SEQ ID NO.91) |
| (Gly⁸,Aib³⁵,Arg^{25,34},Lys²⁶(N^{ε}-hexadecanoyl))hGLP-1(7-36)NH₂; | (SEQ ID NO.92) |
| (Gly⁸,Aib³⁵,Arg^{25,34},Lys²⁶(N^{ε}-decanoyl))hGLP-1(7-36)NH₂; | (SEQ ID NO.93) |
| (Gly⁸,Lys²⁶(N^{ε}-octanoyl),Arg³⁴,β-Ala³⁵)hGLP-1(7-36)NH₂; | (SEQ ID NO.94) |
| (Gly⁸,Lys²⁶(N^{ε}-tetradecanoyl),Arg³⁴,β-Ala³⁵)hGLP-1(7-36)NH₂; | (SEQ ID NO.95) |
| (Gly⁸,Lys²⁶(N^{ε}-hexadecanoyl),Arg³⁴,β-Ala³⁵)hGLP-1(7-36)NH₂; | (SEQ ID NO.96) |
| (Gly⁸,Lys²⁶(N^{ε}-decanoyl),Arg³⁴,β-Ala³⁵)hGLP-1(7-36)NH₂; | (SEQ ID NO.97) |
| (Gly⁸,Aib³⁵,Lys³⁴(N^{ε}-octanoyl))hGLP-1(7-36)NH₂; | (SEQ ID NO.98) |
| (Gly⁸,Aib³⁵,Lys³⁴(N^{ε}-tetradecanoyl))hGLP-1(7-36)NH₂; | (SEQ ID NO.99) |
| (Gly⁸,Aib³⁵,Lys³⁴(N^{ε}-hexadecanoyl))hGLP-1(7-36)NH₂; | (SEQ ID NO.100) |
| (Gly⁸,Aib³⁵,Arg²⁶,Lys³⁴(N^{ε}-octanoyl))hGLP-1(7-36)NH₂; | (SEQ ID NO.101) |
| (Gly⁸,Aib³⁵,Arg²⁶,Lys³⁴(N^{ε}-hexadecanoyl))hGLP-1(7-36)NH₂; | (SEQ ID NO.102) |
| (Gly⁸,Aib³⁵,Arg²⁶,Lys³⁴(N^{ε}-decanoyl))hGLP-1(7-36)NH₂; | (SEQ ID NO.103) |
| (Gly⁸,Aib³⁵,Arg^{25,26},Lys³⁴(N^{ε}-octanoyl))hGLP-1(7-36)NH₂; | (SEQ ID NO.104) |
| (Gly⁸,Aib³⁵,Arg^{25,26},Lys³⁴(N^{ε}-tetradecanoyl))hGLP-1(7-36)NH₂; | (SEQ ID NO.105) |
| (Gly⁸,Aib³⁵,Arg^{25,26},Lys³⁴(N^{ε}-hexadecanoyl))hGLP-1(7-36)NH₂; | (SEQ ID NO.106) |
| (Gly⁸,Aib³⁵,Arg^{25,26},Lys³⁴(N^{ε}-decanoyl))hGLP-1(7-36)NH₂; | (SEQ ID NO.107) |
| (Gly⁸,Aib³⁵,Lys²⁵,Arg²⁶,Lys³⁴(N^{ε}-octanoyl))hGLP-1(7-36)NH₂; | (SEQ ID NO.108) |
| (Gly⁸,Aib³⁵,Lys²⁵,Arg²⁶,Lys³⁴(N^{ε}-tetradecanoyl))hGLP-1(7-36)NH₂; | (SEQ ID NO.109) |
| (Gly⁸,Aib³⁵,Lys²⁵,Arg²⁶,Lys³⁴(N^{ε}-hexadecanoyl))hGLP-1(7-36)NH₂; | (SEQ ID NO.110) |
| (Gly⁸,Aib³⁵,Lys³⁶(N^{ε}-octanoyl))hGLP-1(7-36)NH₂; | (SEQ ID NO.111) |
| (Gly⁸,Aib³⁵,Lys³⁶(N^{ε}-tetradecanoyl))hGLP-1(7-36)NH₂; | (SEQ ID NO.112) |
| (Gly⁸,Aib³⁵,Lys³⁶(N^{ε}-hexadecanoyl))hGLP-1(7-36)NH₂; | (SEQ ID NO.113) |
| (Gly⁸,Aib³⁵,Arg²⁶,Lys³⁶(N^{ε}-octanoyl))hGLP-1(7-36)NH₂; | (SEQ ID NO.114) |
| (Gly⁸,Aib³⁵,Arg²⁶,Lys³⁶(N^{ε}-tetradecanoyl))hGLP-1(7-36)NH₂; | (SEQ ID NO.115) |
| (Gly⁸,Aib³⁵,Arg²⁶,Lys³⁶(N^{ε}-hexadecanoyl))hGLP-1(7-36)NH₂; | (SEQ ID NO.116) |
| (Gly⁸,Aib³⁵,Arg^{26,34},Lys³⁶(N^{ε}-octanoyl))hGLP-1(7-36)NH₂; | (SEQ ID NO.117) |
| (Gly⁸,Aib³⁵,Arg^{26,34},Lys³⁶(N^{ε}-hexadecanoyl))hGLP-1(7-36)NH₂; | (SEQ ID NO.118) |
| (Gly⁸,Aib³⁵,Arg^{26,34},Lys³⁸(N^{ε}-octanoyl))hGLP-1(7-38)NH₂; | (SEQ ID NO.119) |
| (Gly⁸,Aib³⁵,Arg^{26,34},Lys³⁸(N^{ε}-decanoyl))hGLP-1(7-38)NH₂; | (SEQ ID NO.120) |
| (Gly⁸,Aib³⁵,Arg^{26,34},Lys³⁸(N^{ε}-tetradecanoyl))hGLP-1(7-38)NH₂; | (SEQ ID NO.121) |
| (Gly⁸,Aib³⁵,Arg^{26,34},Lys³⁸(N^{ε}-hexadecanoyl))hGLP-1(7-38)NH₂; | (SEQ ID NO.122) |
| (Gly⁸,Aib^{35,37},Arg^{25,26,34},Lys³⁸(N^{ε}-octanoyl))hGLP-1(7-38)NH₂; | (SEQ ID NO.123) |
| (Gly⁸,Aib^{35,37},Arg^{25,26,34},Lys³⁸(N^{ε}-decanoyl))hGLP-1(7-38)NH₂; | (SEQ ID NO.124) |
| (Gly⁸,Aib^{35,37},Arg^{25,26,34},Lys³⁸(N^{ε}-tetradecanoyl))hGLP-1(7-38)NH₂; | (SEQ ID NO.125) |
| (Gly⁸,Aib^{35,37},Arg^{25,26,34},Lys³⁸(N^{ε}-hexadecanoyl))hGLP-1(7-38)NH₂; | (SEQ ID NO.126) |
| (Gly⁸,Aib^{35,37},Arg^{26,34},Lys³⁸(N^{ε}-octanoyl))hGLP-1(7-38)NH₂; | (SEQ ID NO.127) |
| (Gly⁸,Aib^{35,37},Arg^{26,34},Lys³⁸(N^{ε}-decanoyl))hGLP-1(7-38)NH₂; | (SEQ ID NO.128) |
| (Gly⁸,Aib^{35,37},Arg^{26,34},Lys³⁸(N^{ε}-hexadecanoyl))hGLP-1(7-38)NH₂; | (SEQ ID NO.129) |
| (Gly⁸,Aib³⁵,Lys²⁵,Arg^{26,34},Lys³⁶(N^{ε}-octanoyl))hGLP-1(7-36)NH₂; | (SEQ ID NO.130) |
| (Gly⁸,Aib³⁵,Lys²⁵,Arg^{26,34},Lys³⁶(N^{ε}-tetradecanoyl)) | (SEQ ID NO.131) |
| hGLP-1(7-36)NH₂; | |
| (Gly⁸,Aib³⁵,Lys²⁵,Arg^{26,34},Lys³⁶(N^{ε}-hexadecanoyl)) | (SEQ ID NO.132) |
| hGLP-1(7-36)NH₂; | |
| (Gly⁸,Aib³⁵,Arg^{25,26,34},Lys³⁶(N^{ε}-octanoyl))hGLP-1(7-36)NH₂; | (SEQ ID NO.133) |
| (Gly⁸,Aib³⁵,Arg^{25,26,34},Lys³⁶(N^{ε}-tetradecanoyl))hGLP-1(7-36)NH₂; | (SEQ ID NO.134) |
| (Gly⁸,Aib³⁵,Arg^{25,26,34},Lys³⁶(N^{ε}-hexadecanoyl))hGLP-1(7-36)NH₂; | (SEQ ID NO.135) |
| (Gly⁸,Aib³⁵,Arg^{25,26,34},Lys³⁵(N^{ε}-decanoyl))hGLP-1(7-36)NH₂; | (SEQ ID NO.136) |
| (Gly⁸,Lys³⁴(N^{ε}-octanoyl),β-Ala³⁵)hGLP-1(7-36)NH₂; | (SEQ ID NO.137) |
| (Gly⁸,Lys³⁴(N^{ε}-tetradecanoyl),β-Ala³⁵)hGLP-1(7-36)NH₂; | (SEQ ID NO.138) |
| (Gly⁸,Lys³⁴(N^{ε}-hexadecanoyl),β-Ala³⁵)hGLP-1(7-36)NH₂; | (SEQ ID NO.139) |
| (Gly⁸,A6c³²,Lys³⁴(N^{e}-octanoyl),β-Ala³⁵)hGLP-1(7-36)NH₂; | (SEQ ID NO.140) |
| (Gly⁸,Glu²³,Lys³⁴(N^{e}-octanoyl),β-Ala³⁵)hGLP-1(7-36)NH₂; | (SEQ ID NO.141) |
| (Gly⁸,Glu²³,A6c³²,Lys³⁴(N^{e}-octanoyl),β-Ala³⁵)hGLP-1(7-36)NH₂; | (SEQ ID NO.142) |
| (Gly⁸,Arg²⁶,Lys³⁴(N^{ε}-octanoyl),β-Ala³⁵)hGLP-1(7-36)NH₂; | (SEQ ID NO.143) |
| (Gly⁸,Arg²⁶,Lys³⁴(N^{ε}-tetradecanoyl),(β-Ala³⁵)hGLP-1(7-36)NH₂; | (SEQ ID NO.144) |
| (Gly⁸,Arg²⁶,Lys³⁴(N^{ε}-hexadecanoyl),β-Ala³⁵)hGLP-1(7-36)NH₂; | (SEQ ID NO.145) |
| (Gly⁸,Arg²⁶,Lys³⁴(N^{ε}-decanoyl),β-Ala³⁵)hGLP-1(7-36)NH₂; | (SEQ ID NO.146) |
| (Gly⁸,Arg^{25,26},Lys³⁴(N^{ε}-octanoyl),β-Ala³⁵)hGLP-1(7-36)NH₂; | (SEQ ID NO.147) |
| (Gly⁸,Arg^{25,26},Lys³⁴(N^{ε}-tetradecanoyl),β-Ala³⁵)hGLP-1(7-36)NH₂; | (SEQ ID NO.148) |
| (Gly⁸,Arg^{25,26},Lys³⁴(N^{ε}-hexadecanoyl),β-Ala³⁵)hGLP-1(7-36)NH₂; | (SEQ ID NO.149) |
| (Gly⁸,Arg^{25,26},Lys³⁴(N^{ε}-decanoyl),β-Ala³⁵)hGLP-1(7-36)NH₂; | (SEQ ID NO.150) |
| (Gly⁸,Lys²⁵,Arg²⁶,Lys³⁴(N^{ε}-octanoyl),β-Ala³⁵)hGLP-1(7-36)NH₂; | (SEQ ID NO.151) |
| (Gly⁸,Lys²⁵,Arg²⁶,Lys³⁴(N^{ε}-tetradecanoyl),β-Ala³⁵) | (SEQ ID NO.152) |
| hGLP-1(7-36)NH₂; | |
| (Gly⁸,Lys²⁵,Arg²⁶,Lys³⁴(N^{ε}-hexadecanoyl),β-Ala³⁵) | (SEQ ID NO.153) |
| hGLP-1(7-36)NH₂; | |
| (Gly⁸,β-Ala³⁵,Lys³⁶(N^{ε}-octanoyl))hGLP-1(7-36)NH₂; | (SEQ ID NO.154) |
| (Gly⁸,β-Ala³⁵,Lys³⁶(N^{ε}-tetradecanoyl))hGLP-1(7-36)NH₂; | (SEQ ID NO.155) |
| (Gly⁸,β-Ala³⁵,Lys³⁶(N^{ε}-hexadecanoyl))hGLP-1(7-36)NH₂; | (SEQ ID NO.156) |
| (Gly⁸,Arg²⁶,β-Ala³⁵,Lys³⁶(N^{ε}-octanoyl))hGLP-1(7-36)NH₂; | (SEQ ID NO.157) |
| (Gly⁸,Arg²⁶,β-Ala³⁵,Lys³⁶(N^{ε}-tetradecanoyl))hGLP-1(7-36)NH₂; | (SEQ ID NO.158) |
| (Gly⁸,Arg²⁶,β-Ala³⁵,Lys³⁶(N^{ε}-hexadecanoyl))hGLP-1(7-36)NH₂; | (SEQ ID NO.159) |
| (Gly⁸,Arg^{26,34},β-Ala³⁵,Lys³⁶(N^{ε}-octanoyl))hGLP-1(7-36)NH₂; | (SEQ ID NO.160) |
| (Gly⁸,Arg^{26,34},β-Ala³⁵,Lys³⁶(N^{ε}-tetradecanoyl))hGLP-1(7-36)NH₂; | (SEQ ID NO.161) |
| (Gly⁸,Arg^{26,34},β-Ala³⁵,Lys³⁶(N^{ε}-hexadecanoyl))hGLP-1(7-36)NH₂; | (SEQ ID NO.162) |
| (Gly⁸,Arg^{26,34},β-Ala³⁵,Lys³⁶(N^{ε}-decanoyl))hGLP-1(7-36)NH₂; | (SEQ ID NO.163) |
| (Gly⁸,Lys²⁵,Arg^{26,34},β-Ala³⁵,Lys³⁶(N^{ε}-octanoyl))hGLP-1(7-36)NH₂; | (SEQ ID NO.164) |
| (Gly⁸,Lys²⁵,Arg^{26,34},Lys³⁶(N^{ε}-tetradecanoyl),β-Ala³⁵) | (SEQ ID NO.165) |
| hGLP-1(7-36)NH₂; | |
| (Gly⁸,Lys²⁵,Arg^{26,34},β-Ala³⁵,Lys³⁶(N^{ε}-hexadecanoyl)) | (SEQ ID NO.166) |
| hGLP-1(7-36)NH₂; | |
| (Gly⁸,Arg^{25,26,34},β-Ala³⁵,Lys³⁶(N^{ε}-octanoyl))hGLP-1(7-36)NH₂; | (SEQ ID NO.167) |
| (Gly⁸,Arg^{25,26,34},β-Ala³⁵,Lys³⁶(N^{ε}-tetradecanoyl))hGLP-1(7-36)NH₂; | (SEQ ID NO.168) |
| (Gly⁸,Arg^{25,26,34},β-Ala³⁵,Lys³⁶(N^{ε}-hexadecanoyl))hGLP-1(7-36)NH₂; | (SEQ ID NO.169) |
| (Gly⁸,Arg^{25,26,34},β-Ala³⁵,Lys³⁶(N^{ε}-decanoyl))hGLP-1(7-36)NH₂; | (SEQ ID NO.170) |
| (Gly⁸,Aib³⁵,Lys²⁶(N^{ε}-octanoyl),A6c³²,Arg³⁴)hGLP-1(7-36)NH₂; | (SEQ ID NO.171) |
| (Gly⁸,Aib³⁵,Lys²⁶(N^{ε}-tetradecanoyl),A6c³²,Arg³⁴) | (SEQ ID NO.172) |
| hGLP-1(7-36)NH₂; | |
| (Gly⁸,Aib³⁵,Lys²⁶(N^{ε}-hexadecanoyl),A6c³²,Arg³⁴) | (SEQ ID NO.173) |
| hGLP-1(7-36)NH₂; | |
| (Gly⁸,Aib³⁵,A6c³²,Lys³⁴(N^{ε}-octanoyl))hGLP-1(7-36)NH₂; | (SEQ ID NO.174) |
| (Gly⁸,Aib³⁵,A6c³²,Lys³⁴(N^{ε}-tetradecanoyl))hGLP-1(7-36)NH₂; | (SEQ ID NO.175) |
| (Gly⁸,Aib³⁵,A6c³²,Lys³⁴(N^{ε}-hexadecanoyl))hGLP-1(7-36)NH₂; | (SEQ ID NO.176) |
| (Gly⁸,Aib³⁵,Arg²⁶,A6c³²,Lys³⁴(N^{ε}-octanoyl))hGLP-1(7-36)NH₂; | (SEQ ID NO.177) |
| (Gly⁸,Aib³⁵,Arg²⁶,A6c³²,Lys³⁴(N^{ε}-tetradecanoyl))hGLP-1(7-36)NH₂; | (SEQ ID NO.178) |
| (Gly⁸,Aib³⁵,A6c³²,Lys³⁶(N^{ε}-octanoyl))hGLP-1(7-36)NH₂; | (SEQ ID NO.179) |
| (Gly⁸,Aib³⁵,A6c³²,Lys³⁶(N^{ε}-tetradecanoyl))hGLP-1(7-36)NH₂; | (SEQ ID NO.180) |
| (Gly⁸,Aib³⁵,A6c³²,Lys³⁶(N^{ε}-hexadecanoyl))hGLP-1(7-36)NH₂; | (SEQ ID NO.181) |
| (Gly⁸,Aib³⁵,Arg²⁶,A6c³²,Lys³⁶(N^{ε}-octanoyl))hGLP-1(7-36)NH₂; | (SEQ ID NO.182) |
| (Gly⁸,Aib³⁵,Arg²⁶,A6c³²,Lys³⁶(N^{ε}-tetradecanoyl))hGLP-1(7-36)NH₂; | (SEQ ID NO.183) |
| (Gly⁸,Aib³⁵,Arg²⁶,A6c³²,Lys³⁶(N^{ε}-hexadecanoyl))hGLP-1(7-36)NH₂; | (SEQ ID NO.184) |
| (Gly⁸,Aib³⁵,Arg^{26,34},A6c³²,Lys³⁶(N^{ε}-octanoyl))hGLP-1(7-36)NH₂; | (SEQ ID NO.185) |
| (Gly⁸,Aib³⁵,Arg^{26,34},A6c³²,Lys³⁶(N^{ε}-decanoyl))hGLP-1(7-36)NH₂; | (SEQ ID NO.186) |
| (Gly⁸,Aib³⁵,Arg^{26,34},A6c³²,Lys³⁶(N^{ε}-tetradecanoyl)) | (SEQ ID NO.187) |
| hGLP-1(7-36)NH₂; | |
| (Gly⁸,Aib³⁵,Arg^{26,34},A6c³²,Lys³⁶(N^{ε}-hexadecanoyl)) | (SEQ ID NO.188) |
| hGLP-1(7-36)NH₂; | |
| (Gly⁸,Aib^{24,35},Lys²⁶(N^{ε}-octanoyl),Arg³⁴)hGLP-1(7-36)NH₂; | (SEQ ID NO.189) |
| (Gly⁸,Aib^{24,35},Lys²⁶(N^{ε}-tetradecanoyl),Arg³⁴)hGLP-1(7-36)NH₂; | (SEQ ID NO.190) |
| (Gly⁸,Aib^{24,35},Lys²⁶(N^{ε}-hexadecanoyl),Arg³⁴)hGLP-1(7-36)NH₂; | (SEQ ID NO.191) |
| (Gly⁸,Aib^{24,35},Arg²⁶,Lys³⁴(N^{ε}-octanoyl))hGLP-1(7-36)NH₂; | (SEQ ID NO.192) |
| (Gly⁸,Aib^{24,35},Arg²⁶,Lys³⁴(N^{ε}-tetradecanoyl))hGLP-1(7-36)NH₂; | (SEQ ID NO.193) |
| (Gly⁸,Aib^{24,35},Arg²⁶,Lys³⁴(N^{ε}-hexadecanoyl))hGLP-1(7-36)NH₂; | (SEQ ID NO.194) |
| (Gly⁸,Aib^{24,35},Arg^{26,34},Lys³⁶(N^{ε}-octanoyl))hGLP-1(7-36)NH₂; | (SEQ ID NO.195) |
| (Gly⁸,Aib^{24,35},Arg^{26,34},Lys³⁶(N^{ε}-tetradecanoyl))hGLP-1(7-36)NH₂; | (SEQ ID NO.196) |
| (Gly⁸,Aib^{24,35},Arg^{26,34},Lys³⁶(N^{ε}-hexadecanoyl))hGLP-1(7-36)NH₂; | (SEQ ID NO.197) |
| (Gly⁸,Aib^{24,35},Glu²³,A6c³²,Lys³⁴(N^{e}-octanoyl))hGLP-1(7-36)NH₂; | (SEQ ID NO.198) |
| (Gly⁸,Aib³⁵,Glu²³,Lys²⁶(N^{ε}-octanoyl),Arg³⁴)hGLP-1(7-36)NH₂; | (SEQ ID NO.199) |
| (Gly⁸,Aib³⁵,Glu²³,Lys²⁶(N^{ε}-tetradecanoyl),Arg³⁴)hGLP-1(7-36)NH₂; | (SEQ ID NO.200) |
| (Gly⁸,Aib³⁵,Glu²³,Lys²⁶(N^{ε}-hexadecanoyl),Arg³⁴)hGLP-1(7-36)NH₂; | (SEQ ID NO.201) |
| (Gly⁸,Aib³⁵,Glu²³,Lys³⁴(N^{e}-octanoyl))hGLP-1(7-36)NH₂; | (SEQ ID NO.202) |
| (Gly⁸,Aib³⁵,Glu²³,A6c³²,Lys³⁴(N^{e}-octanoyl))hGLP-1(7-36)NH₂; | (SEQ ID NO.203) |
| (Gly⁸,Aib³⁵,Glu²³,Arg²⁶,Lys³⁴(N^{ε}-octanoyl))hGLP-1(7-36)NH₂; | (SEQ ID NO.204) |
| (Gly⁸,Aib³⁵,Glu²³,Arg²⁶,Lys³⁴(N^{ε}-tetradecanoyl))hGLP-1(7-36)NH₂; | (SEQ ID NO.205) |
| (Gly⁸,Aib³⁵,Glu²³,Arg²⁶,Lys³⁴(N^{ε}-hexadecanoyl))hGLP-1(7-36)NH₂; | (SEQ ID NO.206) |
| (Gly⁸,Aib³⁵,Glu²³,Lys³⁶(N^{ε}-octanoyl))hGLP-1(7-36)NH₂; | (SEQ ID NO.207) |
| (Gly⁸,Aib³⁵,Glu²³,Lys³⁶(N^{ε}-tetradecanoyl))hGLP-1(7-36)NH₂; | (SEQ ID NO.208) |
| (Gly⁸,Aib³⁵,Glu²³,Lys³⁶(N^{ε}-hexadecanoyl))hGLP-1(7-36)NH₂; | (SEQ ID NO.209) |
| (Gly⁸,Aib³⁵,Glu²³,Arg^{26,34},Lys³⁶(N^{ε}-octanoyl))hGLP-1(7-36)NH₂; | (SEQ ID NO.210) |
| (Gly⁸,Aib³⁵,Glu²³,Arg^{26,34},Lys³⁶(N^{ε}-tetradecanoyl)) | (SEQ ID NO.211) |
| hGLP-1(7-36)NH₂; | |
| (Gly⁸,Aib³⁵,Glu²³,Arg^{26,34},Lys³⁶(N^{ε}-hexadecanoyl)) | (SEQ ID NO.212) |
| hGLP-1(7-36)NH₂; | |
| (Gly⁸,Aib^{30,35},Lys²⁶(N^{ε}-octanoyl),Arg³⁴)hGLP-1(7-36)NH₂; | (SEQ ID NO.213) |
| (Gly⁸,Aib^{30,35},Lys²⁶(N^{ε}-tetradecanoyl),Arg³⁴)hGLP-1(7-36)NH₂; | (SEQ ID NO.214) |
| (Gly⁸,Aib^{30,35},Lys²⁶(N^{ε}-hexadecanoyl),Arg³⁴)hGLP-1(7-36)NH₂; | (SEQ ID NO.215) |
| (Gly⁸,Aib^{30,35},Arg²⁶,Lys³⁴(N^{ε}-octanoyl))hGLP-1(7-36)NH₂; | (SEQ ID NO.216) |
| (Gly⁸,Aib^{30,35},Arg²⁶,Lys³⁴(N^{ε}-tetradecanoyl))hGLP-1(7-36)NH₂; | (SEQ ID NO.217) |
| (Gly⁸,Aib^{30,35},Arg²⁶,Lys³⁴(N^{ε}-hexadecanoyl))hGLP-1(7-36)NH₂; | (SEQ ID NO.218) |
| (Gly⁸,Aib^{30,35},Arg^{26,34},Lys³⁶(N^{ε}-octanoyl))hGLP-1(7-36)NH₂; | (SEQ ID NO.219) |
| (Gly⁸,Aib^{30,35},Arg^{26,34},Lys³⁶(N^{ε}-tetradecanoyl))hGLP-1(7-36)NH₂; | (SEQ ID NO.220) |
| (Gly⁸,Aib^{30,35},Arg^{26,34},Lys³⁶(N^{ε}-hexadecanoyl))hGLP-1(7-36)NH₂; | (SEQ ID NO.221) |
| (Gly⁸,Aib³⁵,Glu²³,A6c³²,Lys³⁶(N^{ε}-octanoyl))hGLP-1(7-36)NH₂; | (SEQ ID NO.222) |
| (Gly⁸,Aib³⁵,Glu²³,A6c³²,Lys³⁶(N^{ε}-tetradecanoyl))hGLP-1(7-36)NH₂; | (SEQ ID NO.223) |
| (Gly⁸,Aib³⁵,Glu²³,A6c³²,Lys³⁶(N^{ε}-hexadecanoyl))hGLP-1(7-36)NH₂; | (SEQ ID NO.224) |
| (Gly⁸,Aib³⁵,Glu²³,Arg^{26,34},A6c³²,Lys³⁶(N^{ε}-octanoyl)) | (SEQ ID NO.225) |
| hGLP-1(7-36)NH₂; | |
| (Gly⁸,Aib³⁵,Glu²³,Arg^{26,34},A6c³²,Lys³⁶(N^{ε}-tetradecanoyl)) | (SEQ ID NO.226) |
| hGLP-1(7-36)NH₂; | |
| (Gly⁸,Aib³⁵,Glu²³,Arg^{26,34},A6c³²,Lys³⁶(N^{ε}-hexadecanoyl)) | (SEQ ID NO.227) |
| hGLP-1(7-36)NH₂; | |
| (Gly⁸,Aib^{24,35},Glu²³,Arg^{26,34},A6c³²,Lys³⁶(N^{ε}-octanoyl)) | (SEQ ID NO.228) |
| hGLP-1(7-36)NH₂; | |
| (Gly⁸,Aib²⁴,34,Glu²³,Arg^{26,34},A6c³²,Lys³⁶(N^{ε}-tetradecanoyl)) | (SEQ ID NO.229) |
| hGLP-1(7-36)NH₂; | |
| (Gly⁸,Aib^{24,35},Glu²³,Arg^{26,34},A6c³²,Lys³⁶(N^{ε}-hexadecanoyl)) | (SEQ ID NO.230) |
| hGLP-1(7-36)NH₂; | |
| (Gly⁸,Aib^{24,30,35},Glu²³,Arg^{26,34},A6c³²,Lys³⁶(N^{ε}-octanoyl)) | (SEQ ID NO.231) |
| hGLP-1(7-36)NH₂; | |
| (Gly⁸,Aib^{24,30,35},Glu²³,Arg^{26,34},A6c³²,Lys³⁶(N^{ε}-tetradecanoyl)) | (SEQ ID NO.232) |
| hGLP-1(7-36)NH₂; | |
| (Gly⁸,Aib^{24,30,35},Glu²³,Arg^{26,34},A6c³²,Lys³⁶(N^{ε}-hexadecanoyl)) | (SEQ ID NO.233) |
| hGLP-1(7-36)NH₂; | |
| ((N^{α}-HEPES-His)⁷,Gly⁸,β-Ala³⁵)hGLP-1(7-36)NH₂; | (SEQ ID NO.234) |
| ((N^{α}-HEPA-His)⁷,Gly⁸,β-Ala³⁵)hGLP-1(7-36)NH₂; | (SEQ ID NO.235) |
| ((N^{α}-tetradecanoyl-His)⁷,Gly⁸,Aib³⁵)hGLP-1(7-36)NH₂; | (SEQ ID NO.236) |
| ((N^{α}-tetradecanoyl-His)⁷,Gly⁸,β-Ala³⁵)hGLP-1(7-36)NH₂; | (SEQ ID NO.237) |
| ((N^{α}-tetradecanoyl-His)⁷,Gly⁸,Aib³⁵,Arg^{26,34}) | (SEQ ID NO.238) |
| hGLP-1(7-36)NH₂; | |
| ((N^{α}-tetradecanoyl-His)⁷,Gly⁸,Arg^{26,34},β-Ala³⁵) | (SEQ ID NO.239) |
| hGLP-1(7-36)NH₂; | |
| ((N^{α}-tetradecanoyl-His)⁷,Gly⁸,Aib³⁵,Arg^{25,26,34}) | (SEQ ID NO.240) |
| hGLP-1(7-36)NH₂; | |
| ((N^{α}-tetradecanoyl-His)⁷,Gly⁸,Arg^{25,26,34},β-Ala³⁵) | (SEQ ID NO.241) |
| hGLP-1(7-36)NH₂; | |
| (Gly⁸,Aib³⁵,Lys²⁶(N^{ε}-octanesulfonyl),Arg³⁴) | (SEQ ID NO.242) |
| hGLP-1(7-36)NH₂; | |
| (Gly⁸,Aib³⁵,Lys²⁶(N^{ε}-dodecanesulfonyl),Arg³⁴) | (SEQ ID NO.243) |
| hGLP-1(7-36)NH₂; | |
| (Gly⁸,Aib³⁵,Lys²⁶(N^{ε}-hexadecanesulfonyl),Arg³⁴) | (SEQ ID NO.244) |
| hGLP-1(7-36)NH₂; | |
| (Gly⁸,Aib³⁵,Arg²⁶,Lys³⁴(N^{ε}-octanesulfonyl)) | (SEQ ID NO.245) |
| hGLP-1(7-36)NH₂; | |
| (Gly⁸,Aib³⁵,Arg²⁶,Lys³⁴(N^{ε}-dodecanesulfonyl)) | (SEQ ID NO.246) |
| hGLP-1(7-36)NH₂; | |
| (Gly⁸,Aib³⁵,Arg²⁶,Lys³⁴(N^{ε}-hexadecanesulfonyl)) | (SEQ ID NO.247) |
| hGLP-1(7-36)NH₂; | |
| (Gly⁸,Aib³⁵,Arg^{26,34},Lys³⁶(N^{ε}-octanesulfonyl)) | (SEQ ID NO.248) |
| hGLP-1(7-36)NH₂; | |
| (Gly⁸,Aib³⁵,Arg^{26,34},Lys³⁶(N^{ε}-hexadecanesulfonyl)) | (SEQ ID NO.249) |
| hGLP-1(7-36)NH₂; | |
| (Gly⁸,Aib³⁵,Asp²⁶(1-(4-decylpiperazine)),Arg³⁴) | (SEQ ID NO.250) |
| hGLP-1(7-36)NH₂; | |
| (Gly⁸,Aib³⁵,Asp²⁶(1-(4-dodecylpiperazine)),Arg³⁴) | (SEQ ID NO.251) |
| hGLP-1(7-36)NH₂; | |
| (Gly⁸,Aib³⁵,Asp²⁶(1-(4-tetradecylpiperazine)),Arg³⁴) | (SEQ ID NO.252) |
| hGLP-1(7-36)NH₂; | |
| (Gly⁸,Aib³⁵,Asp²⁶(1-(4-hexadecylpiperazine)),Arg³⁴) | (SEQ ID NO.253) |
| hGLP-1(7-36)NH₂; | |
| (Gly⁸,Aib³⁵,Arg²⁶,Asp³⁴(1-(4-decylpiperazine))) | (SEQ ID NO.254) |
| hGLP-1(7-36)NH₂; | |
| (Gly⁸,Aib³⁵,Arg²⁶,Asp³⁴(1-(4-dodecylpiperazine))) | (SEQ ID NO.255) |
| hGLP-1(7-36)NH₂; | |
| (Gly⁸,Aib³⁵,Arg²⁶,Asp³⁴(1-(4-tetradecylpiperazine))) | (SEQ ID NO.256) |
| hGLP-1(7-36)NH₂; | |
| (Gly⁸,Aib³⁵,Arg²⁶,Asp³⁴(1-(4-hexadecylpiperazine))) | (SEQ ID NO.257) |
| hGLP-1(7-36)NH₂; | |
| (Gly⁸,Aib³⁵,Arg^{26,34},Asp³⁶(1-(4-decylpiperazine))) | (SEQ ID NO.258) |
| hGLP-1(7-36)NH₂; | |
| (Gly⁸,Aib³⁵,Arg^{26,34},Asp³⁶(1-(4-dodecylpiperazine))) | (SEQ ID NO.259) |
| hGLP-1(7-36)NH₂; | |
| (Gly⁸,Aib³⁵,Arg^{26,34},Asp³⁶(1-(4-hexadecylpiperazine))) | (SEQ ID NO.260) |
| hGLP-1(7-36)NH₂; | |
| (Gly⁸,Aib³⁵,Arg^{26,34},Asp³⁸(1-(4-decylpiperazine))) | (SEQ ID NO.261) |
| hGLP-1(7-38)NH₂; | |
| (Gly⁸,Aib³⁵,Arg^{26,34},Asp³⁸(1-(4-dodecylpiperazine))) | (SEQ ID NO.262) |
| hGLP-1(7-38)NH₂; | |
| (Gly⁸,Aib³⁵,Arg^{26,34},Asp³⁸(1-(4-tetradecylpiperazine))) | (SEQ ID NO.263) |
| hGLP-1(7-38)NH₂; | |
| (Gly⁸,Aib³⁵,Arg^{26,34},Asp³⁸(1-(4-hexadecylpiperazine))) | (SEQ ID NO.264) |
| hGLP-1(7-38)NH₂; | |
| (Gly⁸,Aib^{35,37},Arg^{26,34},Asp³⁸(1-(4-decylpiperazine))) | (SEQ ID NO.265) |
| hGLP-1(7-38)NH₂; | |
| (Gly⁸,Aib^{35,37},Arg^{26,34},Asp³⁸(1-(4-dodecylpiperazine))) | (SEQ ID NO.266) |
| hGLP-1(7-38)NH₂; | |
| (Gly⁸,Aib^{35,37},Arg^{26,34},Asp³⁸(1-(4-tetradecylpiperazine))) | (SEQ ID NO.267) |
| hGLP-1(7-38)NH₂; | |
| (Gly⁸,Aib^{35,37},Arg^{26,34},Asp³⁸(1-(4-hexadecylpiperazine))) | (SEQ ID NO.268) |
| hGLP-1(7-38)NH₂; | |
| (Gly⁸,Aib³⁵,Arg^{25,34},Asp²⁶(1-(4-decylpiperazine))) | (SEQ ID NO.269) |
| hGLP-1(7-36)NH₂; | |
| (Gly⁸,Aib³⁵,Arg^{25,34},Asp²⁶(1-(4-dodecylpiperazine))) | (SEQ ID NO.270) |
| hGLP-1(7-36)NH₂; | |
| (Gly⁸,Aib³⁵,Arg^{25,34},Asp²⁶(1-(4-tetradecylpiperazine))) | (SEQ ID NO.271) |
| hGLP-1(7-36)NH₂; | |
| (Gly⁸,Aib³⁵,Arg^{25,34},Asp²⁶(1-(4-hexadecylpiperazine))) | (SEQ ID NO.272) |
| hGLP-1(7-36)NH₂; | |
| (Gly⁸,Aib³⁵,Arg^{25,26},Asp³⁴(1-(4-decylpiperazine))) | (SEQ ID NO.273) |
| hGLP-1(7-36)NH₂; | |
| (Gly⁸,Aib³⁵,Arg^{25,26},Asp³⁴(1-(4-dodecylpiperazine))) | (SEQ ID NO.274) |
| hGLP-1(7-36)NH₂; | |
| (Gly⁸,Aib³⁵,Arg^{25,26},Asp³⁴(1-(4-tetradecylpiperazine))) | (SEQ ID NO.275) |
| hGLP-1(7-36)NH₂; | |
| (Gly⁸,Aib³⁵,Arg^{25,26},Asp³⁴(1-(4-hexadecylpiperazine))) | (SEQ ID NO.276) |
| hGLP-1(7-36)NH₂; | |
| (Gly⁸,Aib³⁵,Arg^{25,26,34},Asp³⁶(1-(4-decylpiperazine))) | (SEQ ID NO.277) |
| hGLP-1(7-36)NH₂; | |
| (Gly⁸,Aib³⁵,Arg^{25,26,34},Asp³⁶(1-(4-dodecylpiperazine))) | (SEQ ID NO.278) |
| hGLP-1(7-36)NH₂; | |
| (Gly⁸,Aib³⁵,Arg^{25,26,34},Asp³⁶(1-(4-tetradecylpiperazine))) | (SEQ ID NO.279) |
| hGLP-1(7-36)NH₂; | |
| (Gly⁸,Aib³⁵,Arg^{25,26,34},Asp³⁶(1-(4-hexadecylpiperazine))) | (SEQ ID NO.280) |
| hGLP-1(7-36)NH₂; | |
| (Gly⁸,Aib³⁵,Arg^{25,26,34},Asp³⁸(1-(4-decylpiperazine))) | (SEQ ID NO.281) |
| hGLP-1(7-38)NH₂; | |
| (Gly⁸,Aib³⁵,Arg^{25,26,34},Asp³⁸(1-(4-dodecylpiperazine))) | (SEQ ID NO.282) |
| hGLP-1(7-38)NH₂; | |
| (Gly⁸,Aib³⁵,Arg^{25,26,34},Asp³⁸(1-(4-tetradecylpiperazine))) | (SEQ ID NO.283) |
| hGLP-1(7-38)NH₂; | |
| (Gly⁸,Aib³⁵,Arg^{25,26,34},Asp³⁸(1-(4-hexadecylpiperazine))) | (SEQ ID NO.284) |
| hGLP-1(7-38)NH₂; | |
| (Gly⁸,Aib^{35,37},Arg^{25,26,34},Asp³⁸(1-(4-decylpiperazine))) | (SEQ ID NO.285) |
| hGLP-1(7-38)NH₂; | |
| (Gly⁸,Aib^{35,37},Arg^{25,26,34},Asp³⁸(1-(4-dodecylpiperazine))) | (SEQ ID NO.286) |
| hGLP-1(7-38)NH₂; | |
| (Gly⁸,Aib^{35,37},Arg^{25,26,34},Asp³⁸(1-(4-tetradecylpiperazine))) | (SEQ ID NO.287) |
| hGLP-1(7-38)NH₂; | |
| (Gly⁸,Aib^{35,37},Arg^{25,26,34},Asp³⁸(1-(4-hexadecylpiperazine))) | (SEQ ID NO.288) |
| hGLP-1(7-38)NH₂; | |
| Gly⁸,Aib³⁵,Arg^{26,34},Glu³⁶(1-dodecylamino)) | (SEQ ID NO.289) |
| hGLP-1(7-36)NH₂; | |
| (Gly⁸,Aib³⁵,Glu²⁶(1-dodecylamino),Arg³⁴) | (SEQ ID NO.290) |
| hGLP-1(7-36)NH₂; | |
| (Gly⁸,Aib³⁵,Arg²⁶,Glu³⁴(1-dodecylamino)) | (SEQ ID NO.291) |
| hGLP-1(7-36)NH₂; | |
| (Gly⁸,Aib^{35,37},Arg^{26,34},Glu³⁸(1-dodecylamino)) | (SEQ ID NO.292) |
| hGLP-1(7-38)NH₂; | |
| (Gly⁸,Aib³⁵,Arg³⁴,Lys²⁶(N^{ε}-(2-(4-decyl-1-piperazine)-acetyl))) | (SEQ ID NO.293) |
| hGLP-1(7-36)NH₂; | |
| (Gly⁸,Aib³⁵,Arg³⁴,Lys²⁶(N^{ε}-(2-(4-dodecyl-1-piperazine)-acetyl))) | (SEQ ID NO.294) |
| hGLP-1(7-36)NH₂; | |
| (Gly⁸,Aib³⁵,Arg³⁴,Lys²⁶(N^{ε}-(2-(4-tetradecyl-1-piperazine)-acetyl))) | (SEQ ID NO.295) |
| hGLP-1(7-36)NH₂; | |
| (Gly⁸,Aib³⁵,Arg³⁴,Lys²⁶(N^{ε}-(2-(4-hexadecyl-1-piperazine)-acetyl))) | (SEQ ID NO.296) |
| hGLP-1(7-36)NH₂; | |
| (Gly⁸,Aib³⁵,Arg²⁶,Lys³⁴(N^{ε}-(2-(4-decyl-1-piperazine)-acetyl))) | (SEQ ID NO.297) |
| hGLP-1(7-36)NH₂; | |
| (Gly⁸,Aib³⁵,Arg²⁶,Lys³⁴(N^{ε}-(2-(4-dodecyl-1-piperazine)-acetyl)) | (SEQ ID NO.298) |
| hGLP-1(7-36)NH₂; | |
| (Gly⁸,Aib³⁵,Arg²⁶,Lys³⁴(N^{ε}-(2-(4-tetradecyl-1-piperazine)-acetyl))) | (SEQ ID NO.299) |
| hGLP-1(7-36)NH₂; | |
| (Gly⁸,Aib³⁵,Arg²⁶,Lys³⁴(N^{ε}-(2-(4-hexadecyl-1-piperazine)-acetyl))) | (SEQ ID NO.300) |
| hGLP-1(7-36)NH₂; | |
| (Gly⁸,Aib³⁵,Arg^{26,34},Lys³⁶(N^{ε}-(2-(4-decyl-1-piperazine)-acetyl))) | (SEQ ID NO.301) |
| hGLP-1(7-36)NH₂; | |
| (Gly⁸,Aib³⁵,Arg^{26,34},Lys³⁶(N^{ε}-(2-(4-dodecyl-1-piperazine)-acetyl))) | (SEQ ID NO.302) |
| hGLP-1(7-36)NH₂; | |
| (Gly⁸,Aib³⁵,Arg^{26,34},Lys³⁶(N^{ε}-(2-(4-hexadecyl-1-piperazine)-acetyl))) | (SEQ ID NO.303) |
| hGLP-1(7-36)NH₂; | |
| (Gly⁸,Aib³⁵,Arg^{26,34},Lys³⁸(N^{ε}-(2-(4-decyl-1-piperazine)-acetyl))) | (SEQ ID NO.304) |
| hGLP-1(7-38)NH₂; | |
| (Gly⁸,Aib³⁵,Arg^{26,34},Lys³⁸(N^{ε}-(2-(4-dodecyl-1-piperazine)-acetyl))) | (SEQ ID NO.305) |
| hGLP-1(7-38)NH₂; | |
| (Gly⁸,Aib³⁵,Arg^{26,34},Lys³⁸(N^{ε}-(2-(4-tetradecyl-1-piperazine)-acetyl))) | (SEQ ID NO.306) |
| hGLP-1(7-38)NH₂; | |
| (Gly⁸,Aib³⁵,Arg^{26,34},Lys³⁸(N^{ε}-(2-(4-hexadecyl-1-piperazine)-acetyl))) | (SEQ ID NO.307) |
| hGLP-1(7-38)NH₂; | |
| (Gly⁸,Aib^{35,37},Arg^{26,34},Lys³⁸(N^{ε}-(2-(4-decyl-1-piperazine)-acetyl))) | (SEQ ID NO.308) |
| hGLP-1(7-38)NH₂; | |
| (Gly⁸,Aib^{35,37},Arg^{26,34},Lys³⁸(N^{ε}-(2-(4-dodecyl-1-piperazine)-acetyl))) | (SEQ ID NO.309) |
| hGLP-1(7-38)NH₂; | |
| (Gly⁸,Aib^{35,37},Arg^{26,34},Lys³⁸(N^{ε}-(2-(4-tetradecyl-1-piperazine)-acetyl))) | (SEQ ID NO.310) |
| hGLP-1(7-38)NH₂; | |
| (Gly⁸,Aib^{35,37},Arg^{26,34},Lys³⁸(N^{ε}-(2-(4-hexadecyl-1-piperazine)-acetyl))) | (SEQ ID NO.311) |
| hGLP-1(7-38)NH₂; | |
| (Gly⁸,Aib³⁵,Arg^{25,34},Lys²⁶(N^{ε}-(2-(4-decyl-1-piperazine)-acetyl))) | (SEQ ID NO.312) |
| hGLP-1(7-36)NH₂; | |
| (Gly⁸,Aib³⁵,Arg^{25,34},Lys²⁶(N^{ε}-(2-(4-dodecyl-1-piperazine)-acetyl))) | (SEQ ID NO.313) |
| hGLP-1(7-36)NH₂; | |
| (Gly⁸,Aib³⁵,Arg^{25,34},Lys²⁶(N^{ε}-(2-(4-tetradecyl-1-piperazine)-acetyl))) | (SEQ ID NO.314) |
| hGLP-1(7-36)NH₂; | |
| (Gly⁸,Aib³⁵,Arg^{25,34},Lys²⁶(N^{ε}-(2-(4-hexadecyl-1-piperazine)-acetyl))) | (SEQ ID NO.315) |
| hGLP-1(7-36)NH₂; | |
| (Gly⁸,Aib³⁵,Arg^{25,26},Lys³⁴(N^{ε}-(2-(4-decyl-1-piperazine)-acetyl))) | (SEQ ID NO.316) |
| hGLP-1(7-36)NH₂; | |
| (Gly⁸,Aib³⁵,Arg^{25,26},Lys³⁴(N^{ε}-(2-(4-dodecyl-1-piperazine)-acetyl))) | (SEQ ID NO.317) |
| hGLP-1(7-36)NH₂; | |
| (Gly⁸,Aib³⁵,Arg^{25,26},Lys³⁴(N^{ε}-(2-(4-tetradecyl-1-piperazine)-acetyl))) | (SEQ ID NO.318) |
| hGLP-1(7-36)NH₂; | |
| (Gly⁸,Aib³⁵,Arg^{25,26},Lys³⁴(N^{ε}-(2-(4-hexadecyl-1-piperazine)-acetyl))) | (SEQ ID NO.319) |
| hGLP-1(7-36)NH₂; | |
| (Gly⁸,Aib³⁵,Arg^{25,26,34},Lys³⁶(N^{ε}-(2-(4-decyl-1-piperazine)-acetyl))) | (SEQ ID NO.320) |
| hGLP-1(7-36)NH₂; | |
| (Gly⁸,Aib³⁵,Arg2526,34,Lys³⁶(N^{ε}-(2-(4-dodecyl-1-piperazine)-acetyl))) | (SEQ ID NO.321) |
| hGLP-1(7-36)NH₂; | |
| (Gly⁸,Aib³⁵,Arg^{25,26,34},Lys³⁶(N^{ε}-(2-(4-tetradecyl-1-piperazine)-acetyl))) | (SEQ ID NO.322) |
| hGLP-1(7-36)NH₂; | |
| (Gly⁸,Aib³⁵,Arg^{25,26,34},Lys³⁶(N^{ε}-(2-(4-hexadecyl-1-piperazine)-acetyl))) | (SEQ ID NO.323) |
| hGLP-1(7-36)NH₂; | |
| (Gly⁸,Aib³⁵,Arg^{25,26,34},Lys³⁸(N^{ε}-(2-(4-decyl-1-piperazine)-acetyl))) | (SEQ ID NO.324) |
| hGLP-1(7-38)NH₂; | |
| (Gly⁸,Aib³⁵,Arg^{25,26,34},Lys³⁸(N^{ε}-(2-(4-dodecyl-1-piperazine)-acetyl))) | (SEQ ID NO.325) |
| hGLP-1(7-38)NH₂; | |
| (Gly⁸,Aib³⁵,Arg^{25,26,34},Lys³⁸(N^{ε}-(2-(4-tetradecyl-1-piperazine)-acetyl))) | (SEQ ID NO.326) |
| hGLP-1(7-38)NH₂; | |
| (Gly⁸,Aib³⁵,Arg^{25,26,34},Lys³⁸(N^{ε}-(2-(4-hexadecyl-1-piperazine)-acetyl))) | (SEQ ID NO.327) |
| hGLP-1(7-38)NH₂; | |
| (Gly⁸,Aib^{35,37},Arg^{25,26,34},Lys³⁸(N^{ε}-(2-(4-decyl-1-piperazine)-acetyl))) | (SEQ ID NO.328) |
| hGLP-1(7-38)NH₂; | |
| (Gly⁸,Aib^{35,37},Arg^{25,26,34},Lys³⁸(N^{ε}-(2-(4-dodecyl-1-piperazine)-acetyl))) | (SEQ ID NO.329) |
| hGLP-1(7-38)NH₂; | |
| (Gly⁸,Aib^{35,37},Arg^{25,26,34},Lys³⁸(N^{ε}-(2-(4-tetradecyl-1-piperazine)-acetyl))) | (SEQ ID NO.330) |
| hGLP-1(7-38)NH₂; | |
| (Gly⁸,Aib^{35,37},Arg^{25,26,34},Lys³⁸(N^{ε}-(2-(4-hexadecyl-1-piperazine)-acetyl))) | (SEQ ID NO.331) |
| hGLP-1(7-38)NH₂; | |
| (Gly⁸,Aib³⁵,Arg^{26,34},Lys³⁶(N^{ε}-decanoyl))hGLP-1(7-36)OH; | (SEQ ID NO.332) |
| (Gly⁸,Aib³⁵,Lys²⁵,Arg^{26,34},Lys³⁶(N^{ε}-decanoyl))hGLP-1(7-36)OH; | (SEQ ID NO.333) |
| (Gly⁸,Aib³⁵,Arg^{26,34},Ava³⁷,Ado³⁸)hGLP-1(7-38)NH₂; | (SEQ ID NO.334) |
| (Gly⁸,Aib³⁵,Arg^{26,34},Asp³⁷,Ava³⁸,Ado³⁹)hGLP-1(7-39)NH₂; | (SEQ ID NO.335) |
| (Gly⁸,Aib³⁵,Arg^{26,34},Aun³⁷)hGLP-1(7-37)NH₂; | (SEQ ID NO.336) |
| (Gly⁸,Aib^{17,35})hGLP-1(7-36)NH₂; | (SEQ ID NO.337) |
| (Gly⁸,Arg^{26,34},β-Ala³⁵,D-Asp³⁷,Ava³⁸,Aun³⁹)hGLP-1(7-39)NH₂; | (SEQ ID NO.338) |
| (Gly⁸,Glu^{22,23},β-Ala³⁵)hGLP-1(7-36)NH₂; | (SEQ ID NO.339) |
| (Gly⁸,Lys¹⁸,β-Ala³⁵)hGLP-1(7-36)NH₂; | (SEQ ID NO.340) |
| (Gly⁸,Leu²⁷,β-Ala³⁵)hGLP-1(7-36)NH₂; | (SEQ ID NO.341) |
| (Gly⁸,Lys³³,β-Ala³⁵)hGLP-1(7-36)NH₂; | (SEQ ID NO.342) |
| (Gly⁸,Lys¹⁸,Leu²⁷,β-Ala³⁵)hGLP-1(7-36)NH₂; | (SEQ ID NO.343) |
| (Gly⁸,D-Arg³⁶)hGLP-1(7-36)NH₂; | (SEQ ID NO.344) |
| (Gly⁸,β-Ala³⁵,D-Arg³⁷)hGLP-1(7-37)NH₂; | (SEQ ID NO.345) |
| (Gly⁸,Aib²⁷,β-Ala³⁵)hGLP-1(7-36)NH₂; | (SEQ ID NO.346) |
| (Gly⁸,Aib²⁷,β-Ala^{35,37},Arg³⁸)hGLP-1(7-38)NH₂; | (SEQ ID NO.347) |
| (Gly⁸,Aib²⁷,β-Ala^{35,37},Arg^{38,39})hGLP-1(7-39)NH₂; | (SEQ ID NO.348) |
| (Gly⁸,Lys¹⁸,27,β-Ala³⁵)hGLP-1(7-36)NH₂; | (SEQ ID NO.349) |
| (Gly⁸,Lys²⁷,β-Ala³⁵)hGLP-1(7-36)NH₂; | (SEQ ID NO.350) |
| (Gly⁸,β-Ala³⁵,Arg³⁸)hGLP-1(7-38)NH₂; | (SEQ ID NO.351) |
| (Gly⁸,Arg^{26,34},β-Ala³⁵)hGLP-1(7-36)NH₂; | (SEQ ID NO.352) |
| (Gly⁸,D-Arg³⁵)hGLP-1(7-36)NH₂; | (SEQ ID NO.353) |
| (Gly⁸,β-Ala³⁵,Arg³⁷)hGLP-1(7-37)NH₂; | (SEQ ID NO.354) |
| (Gly⁸,Phe³¹,β-Ala³⁵)hGLP-1(7-36)NH₂; | (SEQ ID NO.355) |
| (Gly⁸,Aib³⁵,Phe³¹)hGLP-1(7-36)NH₂; | (SEQ ID NO.356) |
| (Gly⁸,Aib³⁵,2-Nal³¹)hGLP-1(7-36)NH₂; | (SEQ ID NO.357) |
| (Gly⁸,Aib³⁵,2-Nal^{28,31})hGLP-1(7-36)NH₂; | (SEQ ID NO.358) |
| (Gly⁸,Aib³⁵,Arg^{26,34},2-Nal³¹)hGLP-1(7-36)NH₂; | (SEQ ID NO.359) |
| (Gly⁸,Aib³⁵,Arg^{26,34},Phe³¹)hGLP-1(7-36)NH₂; | (SEQ ID NO.360) |
| (Gly⁸,Aib³⁵,2-Nal^{19,31})hGLP-1(7-36)NH₂; | (SEQ ID NO.361) |
| (Gly⁸,Aib³⁵,2-Nal^{12,31})hGLP-1(7-36)NH₂; | (SEQ ID NO.362) |
| (Gly⁸,Aib³⁵,Lys³⁶(N^{ε}-decanoyl))hGLP-1(7-36)NH₂; | (SEQ ID NO.363) |
| (Gly⁸,Aib³⁵,Arg³⁴,Lys²⁶(N^{ε}-decanoyl))hGLP-1(7-36)NH₂; | (SEQ ID NO.364) |
| (Gly⁸,Aib³⁵,Arg^{26,34},Lys³⁶(N^{ε}-dodecanoyl))hGLP-1(7-36)NH₂; | (SEQ ID NO.365) |
| (Gly⁸,β-Ala³⁵,Ser³⁷(O-decanoyl))hGLP1(7-37)-NH₂; | (SEQ ID NO.366) |
| (Gly⁸,Aib²⁷,β-Ala^{35,37},Arg³⁸,Lys³⁹(N^{ε}-octanoyl))hGLP-1(7-39)NH₂; | (SEQ ID NO.367) |
| (Gly⁸,Arg^{26,34},β-Ala³⁵,Lys³⁷(N^{ε}-octanoyl))hGLP-1(7-37)NH₂; | (SEQ ID NO.368) |
| (Gly⁸,Arg^{26,34},β-Ala³⁵,Lys³⁷(N^{ε}-decanoyl))hGLP-1(7-37)NH₂; | (SEQ ID NO.369) |
| (Gly⁸,Arg^{26,34},β-Ala³⁵,Lys³⁷(N^{ε}-tetradecanoyl))hGLP-1(7-37)NH₂; | (SEQ ID NO.370) |
| (Gly⁸,Arg^{26,34},β-Ala³⁵,Lys³⁷(N^{ε}-dodecanoyl))hGLP-1(7-37)NH₂; | (SEQ ID NO.371) |
| (Gly⁸,Arg^{26,34},β-Ala³⁵,Lys³⁷(N^{ε}-dodecanoyl))hGLP-1(8-37)NH₂; | (SEQ ID NO.372) |
| (Gly⁸,Arg²⁶,Aib³⁵)hGLP-1(7-36)NH₂; | (SEQ ID NO.373) |
| (Gly⁸,Arg²⁶,Phe³¹,Aib³⁵)hGLP-1(7-36)NH₂; | (SEQ ID NO.374) |
| (Gly⁸,Arg²⁶,Phe³¹,β-Ala³⁵)hGLP-1(7-36)NH₂; | (SEQ ID NO.375) |
| (Gly⁸,Arg²⁶,β-Ala³⁵)hGLP-1(7-36)NH₂; | (SEQ ID NO.376) |
| (Gly⁸,Arg^{26,34},Phe³¹,Aib³⁵)hGLP-1(7-36)NH₂; | (SEQ ID NO.377) |
| (Gly⁸,Arg^{26,34},Phe³¹,β-Ala³⁵)hGLP-1(7-36)NH₂; | (SEQ ID NO.378) |
| (Gly⁸,Arg³⁴,Aib³⁵)hGLP-1(7-36)NH₂; | (SEQ ID NO.379) |
| (Gly⁸,Arg³⁴,β-Ala³⁵)hGLP-1(7-36)NH₂; | (SEQ ID NO.380) |
| (Gly⁸,Phe³¹,Arg³⁴,Aib³⁵)hGLP-1(7-36)NH₂; | (SEQ ID NO.381) |
| (Gly⁸,Phe³¹,Arg³⁴,β-Ala³⁵)hGLP-1(7-36)NH₂; | (SEQ ID NO.382) |
| (Gly⁸,Arg^{26,34},β-Ala³⁵,Lys³⁶(N^{ε}-Aec-decanoyl))hGLP-1(7-36)NH₂; | (SEQ ID NO.383) |
| or | |
| (Gly⁸,β-Ala³⁵,Ser³⁷(O-decanoyl))hGLP1(7-37)-NH₂; | (SEQ ID NO.384) |

or a pharmaceutically acceptable salt thereof.

12. A compound according to claim 10, wherein said compound is according to the formula:

| | |
|---|---|
| ((N^{α}-Me-His)⁷,Ser⁸,Aib³⁵)hGLP-1(7-36)NH₂; | (SEQ ID NO.385) |
| ((N^{α}-Me-His)⁷,Ser⁸,β-Ala³⁵)hGLP-1(7-36)NH₂; | (SEQ ID NO.386) |
| ((N^{α}-Me-His)⁷,Ser⁸,Aib³⁵,Arg^{26,34})hGLP-1(7-36)NH₂; | (SEQ ID NO.387) |
| ((N^{α}-Me-His)⁷,Ser⁸,Arg^{26,34},β-Ala³⁵)hGLP-1(7-36)NH₂; | (SEQ ID NO.388) |
| (Ser⁸,A6c³⁵)hGLP-1(7-36)NH₂; | (SEQ ID NO.389) |
| (Ser⁸,A5c³⁵)hGLP-1(7-36)NH₂: | (SEQ ID NO.390) |
| (Ser⁸,D-Ala³⁵)hGLP-1(7-36)NH₂; (SEQ ID NO.391) | |
| (Ser⁸,Aib³⁵,A6c³²)hGLP-1(7-36)NH₂; | (SEQ ID NO.392) |
| (Ser⁸,Aib³⁵,A5c³²)hGLP-1(7-36)NH₂; | (SEQ ID NO.393) |
| (Ser⁸,Aib³⁵,Glu²³)hGLP-1(7-36)NH₂; | (SEQ ID NO.394) |
| (Ser⁸,Aib^{24,35})hGLP-1(7-36)NH₂; | (SEQ ID NO.395) |
| (Ser⁸,Aib^{30,35})hGLP-1(7-36)NH₂; | (SEQ ID NO.396) |
| (Ser⁸,Aib^{25,35})hGLP-1(7-36)NH₂; | (SEQ ID NO.397) |
| (Ser⁸,Aib³⁵,A6c^{16,20})hGLP-1(7-36)NH₂; | (SEQ ID NO.398) |
| (Ser⁸,Aib³⁵,A6c^{16,29,32})hGLP-1(7-36)NH₂; | (SEQ ID NO.399) |
| (Ser⁸,Aib³⁵,A6c^{20,32})hGLP-1(7-36)NH₂; | (SEQ ID NO.400) |
| (Ser⁸,Aib³⁵,A6c²⁰)hGLP-1(7-36)NH₂; | (SEQ ID NO.401) |
| (Ser⁸,Aib³⁵,Lys²⁵)hGLP-1(7-36)NH₂; | (SEQ ID NO.402) |
| (Ser⁸,Aib^{24,35},A6c²⁰)hGLP-1(7-36)NH₂; | (SEQ ID NO.403) |
| (Ser⁸,Aib³⁵,A6c^{29,32})hGLP-1(7-36)NH₂; | (SEQ ID NO.404) |
| (Ser⁸,Aib^{24,35},A6c^{29,32})hGLP-1(7-36)NH₂; | (SEQ ID NO.405) |
| (Ser⁸,Aib³⁵,A6c¹²)hGLP-1(7-36)NH₂; | (SEQ ID NO.406) |
| (Ser⁸,Aib³⁵,Cha²⁰)hGLP-1(7-36)NH₂; | (SEQ ID NO.407) |
| (Ser⁸,Aib³⁵,A6c³³)hGLP-1(7-36)NH₂; | (SEQ ID NO.408) |
| (Ser⁸,A6c^{16,20},β-Ala³⁵)hGLP-1(7-36)NH₂; | (SEQ ID NO.409) |
| (Ser⁸,Aib³⁵,β-Ala²²)hGLP-1(7-36)NH₂; | (SEQ ID NO.410) |
| (Ser⁸,Aib^{22,35})hGLP-1(7-36)NH₂; | (SEQ ID NO.411) |
| (Ser⁸,Aib³⁵,Glu²³,A6c³²)hGLP-1(7-36)NH₂; | (SEQ ID NO.412) |
| (Ser⁸,Aib^{24,35},Glu²³,A6c³²)hGLP-1(7-36)NH₂; | (SEQ ID NO.413) |
| (Ser⁸,Aib^{24,25,35},Glu²³,A6c³²)hGLP-1(7-36)NH₂; | (SEQ ID NO.414) |
| (Ser⁸,Aib^{24,25,35},A6c^{16,20,32},Glu²³)hGLP-1(7-36)NH₂; | (SEQ ID NO.415) |
| (Ser⁸,A6c³²,β-Ala³⁵)hGLP-1(7-36)NH₂; | (SEQ ID NO.416) |
| (Ser⁸,A5c³²,β-Ala³⁵)hGLP-1(7-36)NH₂; | (SEQ ID NO.417) |
| (Ser⁸,Glu²³,β-Ala³⁵)hGLP-1(7-36)NH₂; | (SEQ ID NO.418) |
| (Ser⁸,Aib²⁴,β-Ala³⁵)hGLP-1(7-36)NH₂; | (SEQ ID NO.419) |
| (Ser⁸,Aib³⁰,β-Ala³⁵)hGLP-1(7-36)NH₂; | (SEQ ID NO.420) |
| (Ser⁸,Aib²⁵,β-Ala³⁵)hGLP-1(7-36)NH₂; | (SEQ ID NO.421) |
| (Ser⁸,A6c^{16,29,32},β-Ala³⁵)hGLP-1(7-36)NH₂; | (SEQ ID NO.422) |
| (Ser⁸,A6c^{20,32},β-Ala³⁵)hGLP-1(7-36)NH₂; | (SEQ ID NO.423) |
| (Ser⁸,A6c²⁰,β-Ala³⁵)hGLP-1(7-36)NH₂; | (SEQ ID NO.424) |
| (Ser⁸,Lys²⁵,β-Ala³⁵)hGLP-1(7-36)NH₂; | (SEQ ID NO.425) |
| (Ser⁸,Aib²⁴,A6c²⁰,β-Ala³⁵)hGLP-1(7-36)NH₂; | (SEQ ID NO.426) |
| (Ser⁸,A6c^{29,32},β-Ala³⁵)hGLP-1(7-36)NH₂; | (SEQ ID NO.427) |
| (Ser⁸,Aib²⁴,A6c^{29,32},β-Ala³⁵)hGLP-1(7-36)NH₂; | (SEQ ID NO.428) |
| (Ser⁸,A6c¹²,β-Ala³⁵)hGLP-1(7-36)NH₂; | (SEQ ID NO.429) |
| (Ser⁸,Cha²⁰,β-Ala³⁵)hGLP-1(7-36)NH₂; | (SEQ ID NO.430) |
| (Ser⁸,A6c³³,β-Ala³⁵)hGLP-1(7-36)NH₂; | (SEQ ID NO.431) |
| (Ser⁸,β-Ala^{22,35})hGLP-1(7-36)NH₂; | (SEQ ID NO.432) |
| (Ser⁸,Aib²²,β-Ala³⁵)hGLP-1(7-36)NH₂; | (SEQ ID NO.433) |
| (Ser⁸,Glu²³,A6c³²,β-Ala³⁵)hGLP-1(7-36)NH₂; | (SEQ ID NO.434) |
| (Ser⁸,Aib²⁴,Glu²³,A6c³²,β-Ala³⁵)hGLP-1(7-36)NH₂; | (SEQ ID NO.435) |
| (Ser⁸,Aib²⁴,Glu²³,A6c³²,Lys³⁴(N^{e}-octanoyl),β-Ala³⁵) | (SEQ ID NO.436) |
| hGLP-1(7-36)NH₂; | |
| (Ser⁸,Aib^{24,25},Glu²³,A6c³²,β-Ala³⁵)hGLP-1(7-36)NH₂; | (SEQ ID NO.437) |
| (Ser⁸,Aib^{24,25},A6c^{16,20,32},Glu²³,β-Ala³⁵)hGLP-1(7-36)NH₂; | (SEQ ID NO.438) |
| (Ser⁸,Aib³⁵,D-Arg³⁶)hGLP-1(7-36)NH₂; | (SEQ ID NO.439) |
| (Ser⁸,Aib³⁵,D-Lys³⁶)hGLP-1(7-36)NH₂; | (SEQ ID NO.440) |
| (Ser⁸,β-Ala³⁵,D-Arg³⁶)hGLP-1(7-36)NH₂; | (SEQ ID NO.441) |
| (Ser⁸,β-Ala³⁵,D-Lys³⁶)hGLP-1(7-36)NH₂; | (SEQ ID NO.442) |
| (Ser⁸,Aib³⁵,Arg^{26,34})hGLP-1(7-36)NH₂; | (SEQ ID NO.443) |
| (Ser⁸,Arg^{26,34},β-Ala³⁵)hGLP-1(7-36)NH₂; | (SEQ ID NO.444) |
| (Ser⁸,Aib³⁵,Arg^{25,26,34})hGLP-1(7-36)NH₂; | (SEQ ID NO.445) |
| (Ser⁸,Arg^{25,26,34},β-Ala³⁵)hGLP-1(7-36)NH₂; | (SEQ ID NO.446) |
| (Ser⁸,Arg^{26,34},β-Ala³⁵,Lys³⁶(N^{ε}-tetradecanoyl))hGLP-1(7-36)OH; | (SEQ ID NO.447) |
| (Ser⁸,Aib³⁵,Arg^{26,34},Lys³⁶(N^{ε}-tetradecanoyl))hGLP-1(7-37)OH; | (SEQ ID NO.448) |
| (Ser⁸,Aib^{35,37},Arg^{26,34},Lys³⁶(N^{ε}-tetradecanoyl))hGLP-1(7-37)OH; | (SEQ ID NO.449) |
| (Ser⁸,Aib³⁵,Arg^{26,34},Lys³⁸(N^{ε}-tetradecanoyl),D-Ala³⁷) | (SEQ ID NO.450) |
| hGLP-1(7-37)OH; | |
| (Ser⁸,Aib^{35,37},Arg^{26,34},Lys³⁸(N^{ε}-tetradecanoyl))hGLP-1(7-38)OH; | (SEQ ID NO.451) |
| (Ser⁸,Aib³⁵,Arg^{26,34},β-Ala³⁷,Lys³⁸(N^{ε}-tetradecanoyl)) | (SEQ ID NO.452) |
| hGLP-1(7-38)OH; | |
| (Ser⁸,Aib³⁵,Arg^{26,34},Lys³⁹(N^{ε}-tetradecanoyl))hGLP-1(7-38)OH; | (SEQ ID NO.453) |
| (Ser⁸,Arg^{26,34},Lys³⁶(N^{ε}-tetradecanoyl),β-Ala³⁷)hGLP-1(7-37)OH; | (SEQ ID NO.454) |
| (Ser⁸,Aib³⁷,Arg^{26,34},Lys³⁶(N^{ε}-tetradecanoyl))hGLP-1(7-37)OH; | (SEQ ID NO.455) |
| (Ser⁸,Aib³⁵,Arg^{26,34},Ado³⁷)hGLP-1(7-37)OH; | (SEQ ID NO.456) |
| (Ser⁸,Aib³⁵,Arg^{26,34},Ado³⁷)hGLP-1(7-37)NH₂; | (SEQ ID NO.457) |
| (Ser⁸,Arg^{26,34},Lys³⁶(N^{ε}-tetradecanoyl),D-Ala³⁷)hGLP-1(7-37)OH; | (SEQ ID NO.458) |
| (Ser⁸,Aib³⁷,Arg^{26,34},Lys³⁸(N^{ε}-tetradecanoyl))hGLP-1(7-38)OH; | (SEQ ID NO.459) |
| (Ser⁸,Arg^{26,34},β-Ala³⁷,Lys³⁸(N^{ε}-tetradecanoyl))hGLP-1(7-38)OH; | (SEQ ID NO.460) |
| (Ser⁸,Aib³⁵,Lys²⁶(N^{ε}-octanoyl))hGLP-1(7-36)NH₂; | (SEQ ID NO.461) |
| (Ser⁸,Aib³⁵,Lys²⁶(N^{ε}-tetradecanoyl))hGLP-1(7-36)NH₂; | (SEQ ID NO.462) |
| (Ser⁸,Aib³⁵,Lys²⁶(N^{ε}-hexadecanoyl))hGLP-1(7-36)NH₂; | (SEQ ID NO.463) |
| (Ser⁸,Lys²⁶(N^{ε}-octanoyl),β-Ala³⁵)hGLP-1(7-36)NH₂; | (SEQ ID NO.464) |
| (Ser⁸,Lys²⁶(N^{ε}-tetradecanoyl),β-Ala³⁵)hGLP-1(7-36)NH₂; | (SEQ ID NO.465) |
| (Ser⁸,Lys²⁶(N^{ε}-hexadecanoyl),β-Ala³⁵)hGLP-1(7-36)NH₂; | (SEQ ID NO.466) |
| (Ser⁸,Aib³⁵,Lys²⁶(N^{ε}-octanoyl),Arg³⁴)hGLP-1(7-36)NH₂; | (SEQ ID NO.467) |
| (Ser⁸,Aib³⁵,Lys²⁶(N^{ε}-tetradecanoyl),Arg³⁴)hGLP-1(7-36)NH₂; | (SEQ ID NO.468) |
| (Ser⁸,Aib³⁵,Lys²⁶(N^{ε}-hexadecanoyl),Arg³⁴)hGLP-1(7-36)NH₂; | (SEQ ID NO.469) |
| (Ser⁸,Aib³⁵,Lys²⁶(N^{ε}-decanoyl),Arg³⁴)hGLP-1(7-36)NH₂; | (SEQ ID NO.470) |
| (Ser⁸,Aib³⁵,Lys²⁵,Lys²⁶(N^{ε}-octanoyl),Arg³⁴)hGLP-1(7-36)NH₂; | (SEQ ID NO.471) |
| (Ser⁸,Aib³⁵,Lys²⁵,Lys²⁶(N^{ε}-tetradecanoyl),Arg³⁴)hGLP-1(7-36)NH₂; | (SEQ ID NO.472) |
| (Ser⁸,Aib³⁵,Lys²⁵,Lys²⁶(N^{ε}-hexadecanoyl),Arg³⁴)hGLP-1(7-36)NH₂; | (SEQ ID NO.473) |
| (Ser⁸,Aib³⁵,Arg^{25,34},Lys²⁶(N^{ε}-octanoyl))hGLP-1(7-36)NH₂; | (SEQ ID NO.474) |
| (Ser⁸,Aib³⁵,Arg^{25,34},Lys²⁶(N^{ε}-tetradecanoyl))hGLP-1(7-36)NH₂; | (SEQ ID NO.475) |
| (Ser⁸,Aib³⁵,Arg^{25,34},Lys²⁶(N^{ε}-hexadecanoyl))hGLP-1(7-36)NH₂; | (SEQ ID NO.476) |
| (Ser⁸,Aib³⁵,Arg^{25,34},Lys²⁶(N^{ε}-decanoyl))hGLP-1(7-36)NH₂; | (SEQ ID NO.477) |
| (Ser⁸,Lys²⁶(N^{ε}-octanoyl),Arg³⁴,β-Ala³⁵)hGLP-1(7-36)NH₂; | (SEQ ID NO.478) |
| (Ser⁸,Lys²⁶(N^{ε}-tetradecanoyl),Arg³⁴,β-Ala³⁵)hGLP-1(7-36)NH₂; | (SEQ ID NO.479) |
| (Ser⁸,Lys²⁶(N^{ε}-hexadecanoyl),Arg³⁴,β-Ala³⁵)hGLP-1(7-36)NH₂; | (SEQ ID NO.480) |
| (Ser⁸,Lys²⁶(N^{ε}-decanoyl),Arg³⁴,β-Ala³⁵)hGLP-1(7-36)NH₂; | (SEQ ID NO.481) |
| (Ser⁸,Aib³⁵,Lys³⁴(N^{ε}-octanoyl))hGLP-1(7-36)NH₂; | (SEQ ID NO.482) |
| (Ser⁸,Aib³⁵,Lys³⁴(N^{ε}-tetradecanoyl))hGLP-1(7-36)NH₂; | (SEQ ID NO.483) |
| (Ser⁸,Aib³⁵,Lys³⁴(N^{ε}-hexadecanoyl))hGLP-1(7-36)NH₂; | (SEQ ID NO.484) |
| (Ser⁸,Aib³⁵,Arg²⁶,Lys³⁴(N^{ε}-octanoyl))hGLP-1(7-36)NH₂; | (SEQ ID NO.485) |
| (Ser⁸,Aib³⁵,Arg²⁶,Lys³⁴(N^{ε}-hexadecanoyl))hGLP-1(7-36)NH₂; | (SEQ ID NO.486) |
| (Ser⁸,Aib³⁵,Arg²⁶,Lys³⁴(N^{ε}-decanoyl))hGLP-1(7-36)NH₂; | (SEQ ID NO.487) |
| (Ser⁸,Aib³⁵,Arg^{25,26},Lys³⁴(N^{ε}-octanoyl))hGLP-1(7-36)NH₂; | (SEQ ID NO.488) |
| (Ser⁸,Aib³⁵,Arg^{25,26},Lys³⁴(N^{ε}-tetradecanoyl))hGLP-1(7-36)NH₂; | (SEQ ID NO.489) |
| (Ser⁸,Aib³⁵,Arg^{25,26},Lys³⁴(N^{ε}-hexadecanoyl))hGLP-1(7-36)NH₂; | (SEQ ID NO.490) |
| (Ser⁸,Aib³⁵,Arg^{25,26},Lys³⁴(N^{ε}-decanoyl))hGLP-1(7-36)NH₂; | (SEQ ID NO.491) |
| (Ser⁸,Aib³⁵,Lys²⁵,Arg²⁶,Lys³⁴(N^{ε}-octanoyl))hGLP-1(7-36)NH₂; | (SEQ ID NO.492) |
| (Ser⁸,Aib³⁵,Lys²⁵,Arg²⁶,Lys³⁴(N^{ε}-tetradecanoyl))hGLP-1(7-36)NH₂; | (SEQ ID NO.493) |
| (Ser⁸,Aib³⁵,Lys²⁵,Arg²⁶,Lys³⁴(N^{ε}-hexadecanoyl))hGLP-1(7-36)NH₂; | (SEQ ID NO.494) |
| (Ser⁸,Aib³⁵,Lys³⁶(N^{ε}-octanoyl))hGLP-1(7-36)NH₂; | (SEQ ID NO.495) |
| (Ser⁸,Aib³⁵,Lys³⁶(N^{ε}-tetradecanoyl))hGLP-1(7-36)NH₂; | (SEQ ID NO.496) |
| (Ser⁸,Aib³⁵,Lys³⁶(N^{ε}-hexadecanoyl))hGLP-1(7-36)NH₂; | (SEQ ID NO.497) |
| (Ser⁸,Aib³⁵,Arg²⁶,Lys³⁶(N^{ε}-octanoyl))hGLP-1(7-36)NH₂; | (SEQ ID NO.498) |
| (Ser⁸,Aib³⁵,Arg²⁶,Lys³⁶(N^{ε}-tetradecanoyl))hGLP-1(7-36)NH₂; | (SEQ ID NO.499) |
| (Ser⁸,Aib³⁵,Arg²⁶,Lys³⁶(N^{ε}-hexadecanoyl))hGLP-1(7-36)NH₂; | (SEQ ID NO.500) |
| (Ser⁸,Aib³⁵,Arg^{26,34},Lys³⁶(N^{ε}-octanoyl))hGLP-1(7-36)NH₂; | (SEQ ID NO.501) |
| (Ser⁸,Aib³⁵,Arg^{26,34},Lys³⁶(N^{ε}-hexadecanoyl))hGLP-1(7-36)NH₂; | (SEQ ID NO.502) |
| (Ser⁸,Aib³⁵,Arg^{26,34},Lys³⁸(N^{ε}-octanoyl))hGLP-1(7-38)NH₂; | (SEQ ID NO.503) |
| (Ser⁸,Aib³⁵,Arg^{26,34},Lys³⁸(N^{ε}-decanoyl))hGLP-1(7-38)NH₂; | (SEQ ID NO.504) |
| (Ser⁸,Aib³⁵,Arg^{26,34},Lys³⁸(N^{ε}-tetradecanoyl))hGLP-1(7-38)NH₂; | (SEQ ID NO.505) |
| (Ser⁸,Aib³⁵,Arg^{26,34},Lys³⁸(N^{ε}-hexadecanoyl))hGLP-1(7-38)NH₂; | (SEQ ID NO.506) |
| (Ser⁸,Aib^{35,37},Arg^{25,26,34},Lys³⁸(N^{ε}-octanoyl))hGLP-1(7-38)NH₂; | (SEQ ID NO.507) |
| (Ser⁸,Aib^{35,37},Arg^{25,26,34},Lys³⁸(N^{ε}-decanoyl))hGLP-1(7-38)NH₂; | (SEQ ID NO.508) |
| (Ser⁸,Aib^{35,37},Arg^{25,26,34},Lys³⁸(N^{ε}-tetradecanoyl))hGLP-1(7-38)NH₂; | (SEQ ID NO.509) |
| (Ser⁸,Aib^{35,37},Arg^{25,26,34},Lys³⁸(N^{ε}-hexadecanoyl))hGLP-1(7-38)NH₂; | (SEQ ID NO.510) |
| (Ser⁸,Aib^{35,37},Arg^{26,34},Lys³⁸(N^{ε}-octanoyl))hGLP-1(7-38)NH₂; | (SEQ ID NO.511) |
| (Ser⁸,Aib^{35,37},Arg^{26,34},Lys³⁸(N^{ε}-decanoyl))hGLP-1(7-38)NH₂; | (SEQ ID NO.512) |
| (Ser⁸,Aib^{35,37},Arg^{26,34},Lys³⁸(N^{ε}-hexadecanoyl))hGLP-1(7-38)NH₂; | (SEQ ID NO.513) |
| (Ser⁸,Aib³⁵,Lys²⁵,Arg^{26,34},Lys³⁶(N^{ε}-octanoyl))hGLP-1(7-36)NH₂; | (SEQ ID NO.514) |
| (Ser⁸,Aib³⁵,Lys²⁵,Arg^{26,34},Lys³⁶(N^{ε}-tetradecanoyl)) | (SEQ ID NO.515) |
| hGLP-1(7-36)NH₂; | |
| (Ser⁸,Aib³⁵,Lys²⁵,Arg^{26,34},Lys³⁶(N^{ε}-hexadecanoyl)) | (SEQ ID NO.516) |
| hGLP-1(7-36)NH₂; | |
| (Ser⁸,Aib³⁵,Arg^{25,26,34},Lys³⁶(N^{ε}-octanoyl))hGLP-1(7-36)NH₂; | (SEQ ID NO.517) |
| (Ser⁸,Aib³⁵,Arg^{25,26,34},Lys³⁶(N^{ε}-tetradecanoyl))hGLP-1(7-36)NH₂; | (SEQ ID NO.518) |
| (Ser⁸,Aib³⁵,Arg^{25,26,34},Lys³⁶(N^{ε}-hexadecanoyl))hGLP-1(7-36)NH₂; | (SEQ ID NO.519) |
| (Ser⁸,Aib³⁵,Arg^{25,26,34},Lys³⁵(N^{ε}-decanoyl))hGLP-1(7-36)NH₂; | (SEQ ID NO.520) |
| (Ser⁸,Lys³⁴(N^{ε}-octanoyl),β-Ala³⁵)hGLP-1(7-36)NH₂; | (SEQ ID NO.521) |
| (Ser⁸,Lys³⁴(N^{ε}-tetradecanoyl),β-Ala³⁵)hGLP-1(7-36)NH₂; | (SEQ ID NO.522) |
| (Ser⁸,Lys³⁴(N^{ε}-hexadecanoyl),β-Ala³⁵)hGLP-1(7-36)NH₂; | (SEQ ID NO.523) |
| (Ser⁸,A6c³²,Lys³⁴(N^{e}-octanoyl),β-Ala³⁵)hGLP-1(7-36)NH₂; | (SEQ ID NO.524) |
| (Ser⁸,Glu²³,Lys³⁴(N^{e}-octanoyl),β-Ala³⁵)hGLP-1(7-36)NH₂; | (SEQ ID NO.525) |
| (Ser⁸,Glu²³,A6c³²,Lys³⁴(N^{e}-octanoyl),β-Ala³⁵)hGLP-1(7-36)NH₂; | (SEQ ID NO.526) |
| (Ser⁸,Arg²⁶,Lys³⁴(N^{ε}-octanoyl),β-Ala³⁵)hGLP-1(7-36)NH₂; | (SEQ ID NO.527) |
| (Ser⁸,Arg²⁶,Lys³⁴(N^{ε}-tetradecanoyl),(β-Ala³⁵)hGLP-1(7-36)NH₂; | (SEQ ID NO.528) |
| (Ser⁸,Arg²⁶,Lys³⁴(N^{ε}-hexadecanoyl),β-Ala³⁵)hGLP-1(7-36)NH₂; | (SEQ ID NO.529) |
| (Ser⁸,Arg²⁶,Lys³⁴(N^{ε}-decanoyl),β-Ala³⁵)hGLP-1(7-36)NH₂; | (SEQ ID NO.530) |
| (Ser⁸,Arg^{25,26},Lys³⁴(N^{ε}-octanoyl),β-Ala³⁵)hGLP-1(7-36)NH₂; | (SEQ ID NO.531) |
| (Ser⁸,Arg^{25,26},Lys³⁴(N^{ε}-tetradecanoyl),β-Ala³⁵)hGLP-1(7-36)NH₂; | (SEQ ID NO.532) |
| (Ser⁸,Arg^{25,26},Lys³⁴(N^{ε}-hexadecanoyl),β-Ala³⁵)hGLP-1(7-36)NH₂; | (SEQ ID NO.533) |
| (Ser⁸,Arg^{25,26},Lys³⁴(N^{ε}-decanoyl),β-Ala³⁵)hGLP-1(7-36)NH₂; | (SEQ ID NO.534) |
| (Ser⁸,Lys²⁵,Arg²⁶,Lys³⁴(N^{ε}-octanoyl),β-Ala³⁵)hGLP-1(7-36)NH₂; | (SEQ ID NO.535) |
| (Ser⁸,Lys²⁵,Arg²⁶,Lys³⁴(N^{ε}-tetradecanoyl),β-Ala³⁵) | (SEQ ID NO.536) |
| hGLP-1(7-36)NH₂; | |
| (Ser⁸,Lys²⁵,Arg²⁶,Lys³⁴(N^{ε}-hexadecanoyl),β-Ala³⁵) | (SEQ ID NO.537) |
| hGLP-1(7-36)NH₂; | |
| (Ser⁸,β-Ala³⁵,Lys³⁶(N^{ε}-octanoyl))hGLP-1(7-36)NH₂; | (SEQ ID NO.538) |
| (Ser⁸,β-Ala³⁵,Lys³⁶(N^{ε}-tetradecanoyl))hGLP-1(7-36)NH₂; | (SEQ ID NO.539) |
| (Ser⁸,β-Ala³⁵,Lys³⁶(N^{ε}-hexadecanoyl))hGLP-1(7-36)NH₂; | (SEQ ID NO.540) |
| (Ser⁸,Arg²⁶,β-Ala³⁵,Lys³⁶(N^{ε}-octanoyl))hGLP-1(7-36)NH₂; | (SEQ ID NO.541) |
| (Ser⁸,Arg²⁶,β-Ala³⁵,Lys³⁶(N^{ε}-tetradecanoyl))hGLP-1(7-36)NH₂; | (SEQ ID NO.542) |
| (Ser⁸,Arg²⁶,β-Ala³⁵,Lys³⁶(N^{ε}-hexadecanoyl))hGLP-1(7-36)NH₂; | (SEQ ID NO.543) |
| (Ser⁸,Arg^{26,34},β-Ala³⁵,Lys³⁶(N^{ε}-octanoyl))hGLP-1(7-36)NH₂; | (SEQ ID NO.544) |
| (Ser⁸,Arg^{26,34},β-Ala³⁵,Lys³⁶(N^{ε}-tetradecanoyl))hGLP-1(7-36)NH₂; | (SEQ ID NO.545) |
| (Ser⁸,Arg^{26,34},β-Ala³⁵,Lys³⁶(N^{ε}-hexadecanoyl))hGLP-1(7-36)NH₂; | (SEQ ID NO.546) |
| (Ser⁸,Arg^{26,34},β-Ala³⁵,Lys³⁶(N^{ε}-decanoyl))hGLP-1(7-36)NH₂; | (SEQ ID NO.547) |
| (Ser⁸,Lys²⁵,Arg^{26,34},β-Ala³⁵,Lys³⁶(N^{ε}-octanoyl))hGLP-1(7-36)NH₂; | (SEQ ID NO.548) |
| (Ser⁸,Lys²⁵,Arg^{26,34},Lys³⁶(N^{ε}-tetradecanoyl),β-Ala³⁵) | (SEQ ID NO.549) |
| hGLP-1(7-36)NH₂; | |
| (Ser⁸,Lys²⁵,Arg^{26,34},β-Ala³⁵,Lys³⁶(N^{ε}-hexadecanoyl)) | (SEQ ID NO.550) |
| hGLP-1(7-36)NH₂; | |
| (Ser⁸,Arg^{25,26,34},β-Ala³⁵,Lys³⁶(N^{ε}-octanoyl))hGLP-1(7-36)NH₂; | (SEQ ID NO.551) |
| (Ser⁸,Arg^{25,26,34},β-Ala³⁵,Lys³⁶(N^{ε}-tetradecanoyl))hGLP-1(7-36)NH₂; | (SEQ ID NO.552) |
| (Ser⁸,Arg^{25,26,34},β-Ala³⁵,Lys³⁶(N^{ε}-hexadecanoyl))hGLP-1(7-36)NH₂; | (SEQ ID NO.553) |
| (Ser⁸,Arg^{25,26,34},β-Ala³⁵,Lys³⁶(N^{ε}-decanoyl))hGLP-1(7-36)NH₂; | (SEQ ID NO.554) |
| (Ser⁸,Aib³⁵,Lys²⁶(N^{ε}-octanoyl),A6c³²,Arg³⁴)hGLP-1(7-36)NH₂; | (SEQ ID NO.555) |
| (Ser⁸,Aib³⁵,Lys²⁶(N^{ε}-tetradecanoyl),A6c³²,Arg³⁴) | (SEQ ID NO.556) |
| hGLP-1(7-36)NH₂; | |
| (Ser⁸,Aib³⁵,Lys²⁶(N^{ε}-hexadecanoyl),A6c³²,Arg³⁴) | (SEQ ID NO.557) |
| hGLP-1(7-36)NH₂; | |
| (Ser⁸,Aib³⁵,A6c³²,Lys³⁴(N^{ε}-octanoyl))hGLP-1(7-36)NH₂; | (SEQ ID NO.558) |
| (Ser⁸,Aib³⁵,A6c³²,Lys³⁴(N^{ε}-tetradecanoyl))hGLP-1(7-36)NH₂; | (SEQ ID NO.559) |
| (Ser⁸,Aib³⁵,A6c³²,Lys³⁴(N^{ε}-hexadecanoyl))hGLP-1(7-36)NH₂; | (SEQ ID NO.560) |
| (Ser⁸,Aib³⁵,Arg²⁶,A6c³²,Lys³⁴(N^{ε}-octanoyl))hGLP-1(7-36)NH₂; | (SEQ ID NO.561) |
| (Ser⁸,Aib³⁵,Arg²⁶,A6c³²,Lys³⁴(N^{ε}-tetradecanoyl))hGLP-1(7-36)NH₂; | (SEQ ID NO.562) |
| (Ser⁸,Aib³⁵,A6c³²,Lys³⁶(N^{ε}-octanoyl))hGLP-1(7-36)NH₂; | (SEQ ID NO.563) |
| (Ser⁸,Aib³⁵,A6c³²,Lys³⁶(N^{ε}-tetradecanoyl))hGLP-1(7-36)NH₂; | (SEQ ID NO.564) |
| (Ser⁸,Aib³⁵,A6c³²,Lys³⁶(N^{ε}-hexadecanoyl))hGLP-1(7-36)NH₂; | (SEQ ID NO.565) |
| (Ser⁸,Aib³⁵,Arg²⁶,A6c³²,Lys³⁶(N^{ε}-octanoyl))hGLP-1(7-36)NH₂; | (SEQ ID NO.566) |
| (Ser⁸,Aib³⁵,Arg²⁶,A6c³²,Lys³⁶(N^{ε}-tetradecanoyl))hGLP-1(7-36)NH₂; | (SEQ ID NO.567) |
| (Ser⁸,Aib³⁵,Arg²⁶,A6c³²,Lys³⁶(N^{ε}-hexadecanoyl))hGLP-1(7-36)NH₂; | (SEQ ID NO.568) |
| (Ser⁸,Aib³⁵,Arg^{26,34},A6c³²,Lys³⁶(N^{ε}-octanoyl))hGLP-1(7-36)NH₂; | (SEQ ID NO.569) |
| (Ser⁸,Aib³⁵,Arg^{26,34},A6c³²,Lys³⁶(N^{ε}-decanoyl))hGLP-1(7-36)NH₂; | (SEQ ID NO.570) |
| (Ser⁸,Aib³⁵,Arg^{26,34},A6c³²,Lys³⁶(N^{ε}-tetradecanoyl)) | (SEQ ID NO.571) |
| hGLP-1(7-36)NH₂; | |
| (Ser⁸,Aib³⁵,Arg^{26,34},A6c³²,Lys³⁶(N^{ε}-hexadecanoyl)) | (SEQ ID NO.572) |
| hGLP-1(7-36)NH₂; | |
| (Ser⁸,Aib^{24,35},Lys²⁶(N^{ε}-octanoyl),Arg³⁴)hGLP-1(7-36)NH₂; | (SEQ ID NO.573) |
| (Ser⁸,Aib^{24,35},Lys²⁶(N^{ε}-tetradecanoyl),Arg³⁴)hGLP-1(7-36)NH₂; | (SEQ ID NO.574) |
| (Ser⁸,Aib^{24,35},Lys²⁶(N^{ε}-hexadecanoyl),Arg³⁴)hGLP-1(7-36)NH₂; | (SEQ ID NO.575) |
| (Ser⁸,Aib^{24,35},Arg²⁶,Lys³⁴(N^{ε}-octanoyl))hGLP-1(7-36)NH₂; | (SEQ ID NO.576) |
| (Ser⁸,Aib^{24,35},Arg²⁶,Lys³⁴(N^{ε}-tetradecanoyl))hGLP-1(7-36)NH₂; | (SEQ ID NO.577) |
| (Ser⁸,Aib^{24,35},Arg²⁶,Lys³⁴(N^{ε}-hexadecanoyl))hGLP-1(7-36)NH₂; | (SEQ ID NO.578) |
| (Ser⁸,Aib^{24,35},Arg^{26,34},Lys³⁶(N^{ε}-octanoyl))hGLP-1(7-36)NH₂; | (SEQ ID NO.579) |
| (Ser⁸,Aib^{24,35},Arg^{26,34},Lys³⁶(N^{ε}-tetradecanoyl))hGLP-1(7-36)NH₂; | (SEQ ID NO.580) |
| (Ser⁸,Aib^{24,35},Arg^{26,34},Lys³⁶(N^{ε}-hexadecanoyl))hGLP-1(7-36)NH₂; | (SEQ ID NO.581) |
| (Ser⁸,Aib^{24,35},Glu²³,A6c³²,Lys³⁴(N^{e}-octanoyl))hGLP-1(7-36)NH₂; | (SEQ ID NO.582) |
| (Ser⁸,Aib³⁵,Glu²³,Lys²⁶(N^{ε}-octanoyl),Arg³⁴)hGLP-1(7-36)NH₂; | (SEQ ID NO.583) |
| (Ser⁸,Aib³⁵,Glu²³,Lys²⁶(N^{ε}-tetradecanoyl),Arg³⁴)hGLP-1(7-36)NH₂; | (SEQ ID NO.584) |
| (Ser⁸,Aib³⁵,Glu²³,Lys²⁶(N^{ε}-hexadecanoyl),Arg³⁴)hGLP-1(7-36)NH₂; | (SEQ ID NO.585) |
| (Ser⁸,Aib³⁵,Glu²³,Lys³⁴(N^{e}-octanoyl))hGLP-1(7-36)NH₂; | (SEQ ID NO.586) |
| (Ser⁸,Aib³⁵,Glu²³,A6c³²,Lys³⁴(N^{e}-octanoyl))hGLP-1(7-36)NH₂; | (SEQ ID NO.587) |
| (Ser⁸,Aib³⁵,Glu²³,Arg²⁶,Lys³⁴(N^{ε}-octanoyl))hGLP-1(7-36)NH₂; | (SEQ ID NO.588) |
| (Ser⁸,Aib³⁵,Glu²³,Arg²⁶,Lys³⁴(N^{ε}-tetradecanoyl))hGLP-1(7-36)NH₂; | (SEQ ID NO.589) |
| (Ser⁸,Aib³⁵,Glu²³,Arg²⁶,Lys³⁴(N^{ε}-hexadecanoyl))hGLP-1(7-36)NH₂; | (SEQ ID NO.590) |
| (Ser⁸,Aib³⁵,Glu²³,Lys³⁶(N^{ε}-octanoyl))hGLP-1(7-36)NH₂; | (SEQ ID NO.591) |
| (Ser⁸,Aib³⁵,Glu²³,Lys³⁶(N^{ε}-tetradecanoyl))hGLP-1(7-36)NH₂; | (SEQ ID NO.592) |
| (Ser⁸,Aib³⁵,Glu²³,Lys³⁶(N^{ε}-hexadecanoyl))hGLP-1(7-36)NH₂; | (SEQ ID NO.593) |
| (Ser⁸,Aib³⁵,Glu²³,Arg^{26,34},Lys³⁶(N^{ε}-octanoyl))hGLP-1(7-36)NH₂; | (SEQ ID NO.594) |
| (Ser⁸,Aib³⁵,Glu²³,Arg^{26,34},Lys³⁶(N^{ε}-tetradecanoyl)) | (SEQ ID NO.595) |
| hGLP-1(7-36)NH₂; | |
| (Ser⁸,Aib³⁵,Glu²³,Arg^{26,34},Lys³⁶(N^{ε}-hexadecanoyl)) | (SEQ ID NO.596) |
| hGLP-1(7-36)NH₂; | |
| (Ser⁸,Aib^{30,35},Lys²⁶(N^{ε}-octanoyl),Arg³⁴)hGLP-1(7-36)NH₂; | (SEQ ID NO.597) |
| (Ser⁸,Aib^{30,35},Lys²⁶(N^{ε}-tetradecanoyl),Arg³⁴)hGLP-1(7-36)NH₂; | (SEQ ID NO.598) |
| (Ser⁸,Aib^{30,35},Lys²⁶(N^{ε}-hexadecanoyl),Arg³⁴)hGLP-1(7-36)NH₂; | (SEQ ID NO.599) |
| (Ser⁸,Aib^{30,35},Arg²⁶,Lys³⁴(N^{ε}-octanoyl))hGLP-1(7-36)NH₂; | (SEQ ID NO.600) |
| (Ser⁸,Aib^{30,35},Arg²⁶,Lys³⁴(N^{ε}-tetradecanoyl))hGLP-1(7-36)NH₂; | (SEQ ID NO.601) |
| (Ser⁸,Aib^{30,35},Arg²⁶,Lys³⁴(N^{ε}-hexadecanoyl))hGLP-1(7-36)NH₂; | (SEQ ID NO.602) |
| (Ser⁸,Aib^{30,35},Arg^{26,34},Lys³⁶(N^{ε}-octanoyl))hGLP-1(7-36)NH₂; | (SEQ ID NO.603) |
| (Ser⁸,Aib^{30,35},Arg^{26,34},Lys³⁶(N^{ε}-tetradecanoyl))hGLP-1(7-36)NH₂; | (SEQ ID NO.604) |
| (Ser⁸,Aib^{30,35},Arg^{26,34},Lys³⁶(N^{ε}-hexadecanoyl))hGLP-1(7-36)NH₂; | (SEQ ID NO.605) |
| (Ser⁸,Aib³⁵,Glu²³,A6c³²,Lys³⁶(N^{ε}-octanoyl))hGLP-1(7-36)NH₂; | (SEQ ID NO.606) |
| (Ser⁸,Aib³⁵,Glu²³,A6c³²,Lys³⁶(N^{ε}-tetradecanoyl))hGLP-1(7-36)NH₂; | (SEQ ID NO.607) |
| (Ser⁸,Aib³⁵,Glu²³,A6c³²,Lys³⁶(N^{ε}-hexadecanoyl))hGLP-1(7-36)NH₂; | (SEQ ID NO.608) |
| (Ser⁸,Aib³⁵,Glu²³,Arg^{26,34},A6c³²,Lys³⁶(N^{ε}-octanoyl)) | (SEQ ID NO.609) |
| hGLP-1(7-36)NH₂; | |
| (Ser⁸,Aib³⁵,Glu²³,Arg^{26,34},A6c³²,Lys³⁶(N^{ε}-tetradecanoyl)) | (SEQ ID NO.610) |
| hGLP-1(7-36)NH₂; | |
| (Ser⁸,Aib³⁵,Glu²³,Arg^{26,34},A6c³²,Lys³⁶(N^{ε}-hexadecanoyl)) | (SEQ ID NO.611) |
| hGLP-1(7-36)NH₂; | |
| (Ser⁸,Aib^{24,35},Glu²³,Arg^{26,34},A6c³²,Lys³⁶(N^{ε}-octanoyl)) | (SEQ ID NO.612) |
| hGLP-1(7-36)NH₂; | |
| (Ser⁸,Aib²⁴,34,Glu²³,Arg^{26,34},A6c³²,Lys³⁶(N^{ε}-tetradecanoyl)) | (SEQ ID NO.613) |
| hGLP-1(7-36)NH₂; | |
| (Ser⁸,Aib^{24,35},Glu²³,Arg^{26,34},A6c³²,Lys³⁶(N^{ε}-hexadecanoyl)) | (SEQ ID NO.614) |
| hGLP-1(7-36)NH₂; | |
| (Ser⁸,Aib^{24,30,35},Glu²³,Arg^{26,34},A6c³²,Lys³⁶(N^{ε}-octanoyl)) | (SEQ ID NO.615) |
| hGLP-1(7-36)NH₂; | |
| (Ser⁸,Aib^{24,30,35},Glu²³,Arg^{26,34},A6c³²,Lys³⁶(N^{ε}-tetradecanoyl)) | (SEQ ID NO.616) |
| hGLP-1(7-36)NH₂; | |
| (Ser⁸,Aib^{24,30,35},Glu²³,Arg^{26,34},A6c³²,Lys³⁶(N^{ε}-hexadecanoyl)) | (SEQ ID NO.617) |
| hGLP-1(7-36)NH₂; | |
| ((N^{α}-HEPES-His)⁷,Ser⁸,β-Ala³⁵)hGLP-1(7-36)NH₂; | (SEQ ID NO.618) |
| ((N^{α}-HEPA-His)⁷,Ser⁸,β-Ala³⁵)hGLP-1(7-36)NH₂; | (SEQ ID NO.619) |
| ((N^{α}-tetradecanoyl-His)⁷,Ser⁸,Aib³⁵)hGLP-1(7-36)NH₂; | (SEQ ID NO.620) |
| ((N^{α}-tetradecanoyl-His)⁷,Ser⁸,β-Ala³⁵)hGLP-1(7-36)NH₂; | (SEQ ID NO.621) |
| ((N^{α}-tetradecanoyl-His)⁷,Ser⁸,Aib³⁵,Arg^{26,34}) | (SEQ ID NO.622) |
| hGLP-1(7-36)NH₂; | |
| ((N^{α}-tetradecanoyl-His)⁷,Ser⁸,Arg^{26,34},β-Ala³⁵) | (SEQ ID NO.623) |
| hGLP-1(7-36)NH₂; | |
| ((N^{α}-tetradecanoyl-His)⁷,Ser⁸,Aib³⁵,Arg^{25,26,34}) | (SEQ ID NO.624) |
| hGLP-1(7-36)NH₂; | |
| ((N^{α}-tetradecanoyl-His)⁷,Ser⁸,Arg^{25,26,34},β-Ala³⁵) | (SEQ ID NO.625) |
| hGLP-1(7-36)NH₂; | |
| (Ser⁸,Aib³⁵,Lys²⁶(N^{ε}-octanesulfonyl),Arg³⁴) | (SEQ ID NO.626) |
| hGLP-1(7-36)NH₂; | |
| (Ser⁸,Aib³⁵,Lys²⁶(N^{ε}-dodecanesulfonyl),Arg³⁴) | (SEQ ID NO.627) |
| hGLP-1(7-36)NH₂; | |
| (Ser⁸,Aib³⁵,Lys²⁶(N^{ε}-hexadecanesulfonyl),Arg³⁴) | (SEQ ID NO.628) |
| hGLP-1(7-36)NH₂; | |
| (Ser⁸,Aib³⁵,Arg²⁶,Lys³⁴(N^{ε}-octanesulfonyl)) | (SEQ ID NO.629) |
| hGLP-1(7-36)NH₂; | |
| (Ser⁸,Aib³⁵,Arg²⁶,Lys³⁴(N^{ε}-dodecanesulfonyl)) | (SEQ ID NO.630) |
| hGLP-1(7-36)NH₂; | |
| (Ser⁸,Aib³⁵,Arg²⁶,Lys³⁴(N^{ε}-hexadecanesulfonyl)) | (SEQ ID NO.631) |
| hGLP-1(7-36)NH₂; | |
| (Ser⁸,Aib³⁵,Arg^{26,34},Lys³⁶(N^{ε}-octanesulfonyl)) | (SEQ ID NO.632) |
| hGLP-1(7-36)NH₂; | |
| (Ser⁸,Aib³⁵,Arg^{26,34},Lys³⁶(N^{ε}-hexadecanesulfonyl)) | (SEQ ID NO.633) |
| hGLP-1(7-36)NH₂; | |
| (Ser⁸,Aib³⁵,Asp²⁶(1-(4-decylpiperazine)),Arg³⁴) | (SEQ ID NO.634) |
| hGLP-1(7-36)NH₂; | |
| (Ser⁸,Aib³⁵,Asp²⁶(1-(4-dodecylpiperazine)),Arg³⁴) | (SEQ ID NO.635) |
| hGLP-1(7-36)NH₂; | |
| (Ser⁸,Aib³⁵,Asp²⁶(1-(4-tetradecylpiperazine)),Arg³⁴) | (SEQ ID NO.636) |
| hGLP-1(7-36)NH₂; | |
| (Ser⁸,Aib³⁵,Asp²⁶(1-(4-hexadecylpiperazine)),Arg³⁴) | (SEQ ID NO.637) |
| hGLP-1(7-36)NH₂; | |
| (Ser⁸,Aib³⁵,Arg²⁶,Asp³⁴(1-(4-decylpiperazine))) | (SEQ ID NO.638) |
| hGLP-1(7-36)NH₂; | |
| (Ser⁸,Aib³⁵,Arg²⁶,Asp³⁴(1-(4-dodecylpiperazine))) | (SEQ ID NO.639) |
| hGLP-1(7-36)NH₂; | |
| (Ser⁸,Aib³⁵,Arg²⁶,Asp³⁴(1-(4-tetradecylpiperazine))) | (SEQ ID NO.640) |
| hGLP-1(7-36)NH₂; | |
| (Ser⁸,Aib³⁵,Arg²⁶,Asp³⁴(1-(4-hexadecylpiperazine))) | (SEQ ID NO.641) |
| hGLP-1(7-36)NH₂; | |
| (Ser⁸,Aib³⁵,Arg^{26,34},Asp³⁶(1-(4-decylpiperazine))) | (SEQ ID NO.642) |
| hGLP-1(7-36)NH₂; | |
| (Ser⁸,Aib³⁵,Arg^{26,34},Asp³⁶(1-(4-dodecylpiperazine))) | (SEQ ID NO.643) |
| hGLP-1(7-36)NH₂; | |
| (Ser⁸,Aib³⁵,Arg^{26,34},Asp³⁶(1-(4-hexadecylpiperazine))) | (SEQ ID NO.644) |
| hGLP-1(7-36)NH₂; | |
| (Ser⁸,Aib³⁵,Arg^{26,34},Asp³⁸(1-(4-decylpiperazine))) | (SEQ ID NO.645) |
| hGLP-1(7-38)NH₂; | |
| (Ser⁸,Aib³⁵,Arg^{26,34},Asp³⁸(1-(4-dodecylpiperazine))) | (SEQ ID NO.646) |
| hGLP-1(7-38)NH₂; | |
| (Ser⁸,Aib³⁵,Arg^{26,34},Asp³⁸(1-(4-tetradecylpiperazine))) | (SEQ ID NO.647) |
| hGLP-1(7-38)NH₂; | |
| (Ser⁸,Aib³⁵,Arg^{26,34},Asp³⁸(1-(4-hexadecylpiperazine))) | (SEQ ID NO.648) |
| hGLP-1(7-38)NH₂; | |
| (Ser⁸,Aib^{35,37},Arg^{26,34},Asp³⁸(1-(4-decylpiperazine))) | (SEQ ID NO.649) |
| hGLP-1(7-38)NH₂; | |
| (Ser⁸,Aib^{35,37},Arg^{26,34},Asp³⁸(1-(4-dodecylpiperazine))) | (SEQ ID NO.650) |
| hGLP-1(7-38)NH₂; | |
| (Ser⁸,Aib^{35,37},Arg^{26,34},Asp³⁸(1-(4-tetradecylpiperazine))) | (SEQ ID NO.651) |
| hGLP-1(7-38)NH₂; | |
| (Ser⁸,Aib^{35,37},Arg^{26,34},Asp³⁸(1-(4-hexadecylpiperazine))) | (SEQ ID NO.652) |
| hGLP-1(7-38)NH₂; | |
| (Ser⁸,Aib³⁵,Arg^{25,34},Asp²⁶(1-(4-decylpiperazine))) | (SEQ ID NO.653) |
| hGLP-1(7-36)NH₂; | |
| (Ser⁸,Aib³⁵,Arg^{25,34},Asp²⁶(1-(4-dodecylpiperazine))) | (SEQ ID NO.654) |
| hGLP-1(7-36)NH₂; | |
| (Ser⁸,Aib³⁵,Arg^{25,34},Asp²⁶(1-(4-tetradecylpiperazine))) | (SEQ ID NO.655) |
| hGLP-1(7-36)NH₂; | |
| (Ser⁸,Aib³⁵,Arg^{25,34},Asp²⁶(1-(4-hexadecylpiperazine))) | (SEQ ID NO.656) |
| hGLP-1(7-36)NH₂; | |
| (Ser⁸,Aib³⁵,Arg^{25,26},Asp³⁴(1-(4-decylpiperazine))) | (SEQ ID NO.657) |
| hGLP-1(7-36)NH₂; | |
| (Ser⁸,Aib³⁵,Arg^{25,26},Asp³⁴(1-(4-dodecylpiperazine))) | (SEQ ID NO.658) |
| hGLP-1(7-36)NH₂; | |
| (Ser⁸,Aib³⁵,Arg^{25,26},Asp³⁴(1-(4-tetradecylpiperazine))) | (SEQ ID NO.659) |
| hGLP-1(7-36)NH₂; | |
| (Ser⁸,Aib³⁵,Arg^{25,26},Asp³⁴(1-(4-hexadecylpiperazine))) | (SEQ ID NO.660) |
| hGLP-1(7-36)NH₂; | |
| (Ser⁸,Aib³⁵,Arg^{25,26,34},Asp³⁶(1-(4-decylpiperazine))) | (SEQ ID NO.661) |
| hGLP-1(7-36)NH₂; | |
| (Ser⁸,Aib³⁵,Arg^{25,26,34},Asp³⁶(1-(4-dodecylpiperazine))) | (SEQ ID NO.662) |
| hGLP-1(7-36)NH₂; | |
| (Ser⁸,Aib³⁵,Arg^{25,26,34},Asp³⁶(1-(4-tetradecylpiperazine))) | (SEQ ID NO.663) |
| hGLP-1(7-36)NH₂; | |
| (Ser⁸,Aib³⁵,Arg^{25,26,34},Asp³⁶(1-(4-hexadecylpiperazine))) | (SEQ ID NO.664) |
| hGLP-1(7-36)NH₂; | |
| (Ser⁸,Aib³⁵,Arg^{25,26,34},Asp³⁸(1-(4-decylpiperazine))) | (SEQ ID NO.665) |
| hGLP-1(7-38)NH₂; | |
| (Ser⁸,Aib³⁵,Arg^{25,26,34},Asp³⁸(1-(4-dodecylpiperazine))) | (SEQ ID NO.666) |
| hGLP-1(7-38)NH₂; | |
| (Ser⁸,Aib³⁵,Arg^{25,26,34},Asp³⁸(1-(4-tetradecylpiperazine))) | (SEQ ID NO.667) |
| hGLP-1(7-38)NH₂; | |
| (Ser⁸,Aib³⁵,Arg^{25,26,34},Asp³⁸(1-(4-hexadecylpiperazine))) | (SEQ ID NO.668) |
| hGLP-1(7-38)NH₂; | |
| (Ser⁸,Aib^{35,37},Arg^{25,26,34},Asp³⁸(1-(4-decylpiperazine))) | (SEQ ID NO.669) |
| hGLP-1(7-38)NH₂; | |
| (Ser⁸,Aib^{35,37},Arg^{25,26,34},Asp³⁸(1-(4-dodecylpiperazine))) | (SEQ ID NO.670) |
| hGLP-1(7-38)NH₂; | |
| (Ser⁸,Aib^{35,37},Arg^{25,26,34},Asp³⁸(1-(4-tetradecylpiperazine))) | (SEQ ID NO.671) |
| hGLP-1(7-38)NH₂; | |
| (Ser⁸,Aib^{35,37},Arg^{25,26,34},Asp³⁸(1-(4-hexadecylpiperazine))) | (SEQ ID NO.672) |
| hGLP-1(7-38)NH₂; | |
| Ser⁸,Aib³⁵,Arg^{26,34},Glu³⁶(1-dodecylamino)) | (SEQ ID NO.673) |
| hGLP-1(7-36)NH₂; | |
| (Ser⁸,Aib³⁵,Glu²⁶(1-dodecylamino),Arg³⁴) | (SEQ ID NO.674) |
| hGLP-1(7-36)NH₂; | |
| (Ser⁸,Aib³⁵,Arg²⁶,Glu³⁴(1-dodecylamino)) | (SEQ ID NO.675) |
| hGLP-1(7-36)NH₂; | |
| (Ser⁸,Aib^{35,37},Arg^{26,34},Glu³⁸(1-dodecylamino)) | (SEQ ID NO.676) |
| hGLP-1(7-38)NH₂; | |
| (Ser⁸,Aib³⁵,Arg³⁴,Lys²⁶(N^{ε}-(2-(4-decyl-1-piperazine)-acetyl))) | (SEQ ID NO.677) |
| hGLP-1(7-36)NH₂; | |
| (Ser⁸,Aib³⁵,Arg³⁴,Lys²⁶(N^{ε}-(2-(4-dodecyl-1-piperazine)-acetyl))) | (SEQ ID NO.678) |
| hGLP-1(7-36)NH₂; | |
| (Ser⁸,Aib³⁵,Arg³⁴,Lys²⁶(N^{ε}-(2-(4-tetradecyl-1-piperazine)-acetyl))) | (SEQ ID NO.679) |
| hGLP-1(7-36)NH₂; | |
| (Ser⁸,Aib³⁵,Arg³⁴,Lys²⁶(N^{ε}-(2-(4-hexadecyl-1-piperazine)-acetyl))) | (SEQ ID NO.680) |
| hGLP-1(7-36)NH₂; | |
| (Ser⁸,Aib³⁵,Arg²⁶,Lys³⁴(N^{ε}-(2-(4-decyl-1-piperazine)-acetyl))) | (SEQ ID NO.681) |
| hGLP-1(7-36)NH₂; | |
| (Ser⁸,Aib³⁵,Arg²⁶,Lys³⁴(N^{ε}-(2-(4-dodecyl-1-piperazine)-acetyl)) | (SEQ ID NO.682) |
| hGLP-1(7-36)NH₂; | |
| (Ser⁸,Aib³⁵,Arg²⁶,Lys³⁴(N^{ε}-(2-(4-tetradecyl-1-piperazine)-acetyl))) | (SEQ ID NO.683) |
| hGLP-1(7-36)NH₂; | |
| (Ser⁸,Aib³⁵,Arg²⁶,Lys³⁴(N^{ε}-(2-(4-hexadecyl-1-piperazine)-acetyl))) | (SEQ ID NO.684) |
| hGLP-1(7-36)NH₂; | |
| (Ser⁸,Aib³⁵,Arg^{26,34},Lys³⁶(N^{ε}-(2-(4-decyl-1-piperazine)-acetyl))) | (SEQ ID NO.685) |
| hGLP-1(7-36)NH₂; | |
| (Ser⁸,Aib³⁵,Arg^{26,34},Lys³⁶(N^{ε}-(2-(4-dodecyl-1-piperazine)-acetyl))) | (SEQ ID NO.686) |
| hGLP-1(7-36)NH₂; | |
| (Ser⁸,Aib³⁵,Arg^{26,34},Lys³⁶(N^{ε}-(2-(4-hexadecyl-1-piperazine)-acetyl))) | (SEQ ID NO.687) |
| hGLP-1(7-36)NH₂; | |
| (Ser⁸,Aib³⁵,Arg^{26,34},Lys³⁸(N^{ε}-(2-(4-decyl-1-piperazine)-acetyl))) | (SEQ ID NO.688) |
| hGLP-1(7-38)NH₂; | |
| (Ser⁸,Aib³⁵,Arg^{26,34},Lys³⁸(N^{ε}-(2-(4-dodecyl-1-piperazine)-acetyl))) | (SEQ ID NO.689) |
| hGLP-1(7-38)NH₂; | |
| (Ser⁸,Aib³⁵,Arg^{26,34},Lys³⁸(N^{ε}-(2-(4-tetradecyl-1-piperazine)-acetyl))) | (SEQ ID NO.690) |
| hGLP-1(7-38)NH₂; | |
| (Ser⁸,Aib³⁵,Arg^{26,34},Lys³⁸(N^{ε}-(2-(4-hexadecyl-1-piperazine)-acetyl))) | (SEQ ID NO.691) |
| hGLP-1(7-38)NH₂; | |
| (Ser⁸,Aib^{35,37},Arg^{26,34},Lys³⁸(N^{ε}-(2-(4-decyl-1-piperazine)-acetyl))) | (SEQ ID NO.692) |
| hGLP-1(7-38)NH₂; | |
| (Ser⁸,Aib^{35,37},Arg^{26,34},Lys³⁸(N^{ε}-(2-(4-dodecyl-1-piperazine)-acetyl))) | (SEQ ID NO.693) |
| hGLP-1(7-38)NH₂; | |
| (Ser⁸,Aib^{35,37},Arg^{26,34},Lys³⁸(N^{ε}-(2-(4-tetradecyl-1-piperazine)-acetyl))) | (SEQ ID NO.694) |
| hGLP-1(7-38)NH₂; | |
| (Ser⁸,Aib^{35,37},Arg^{26,34},Lys³⁸(N^{ε}-(2-(4-hexadecyl-1-piperazine)-acetyl))) | (SEQ ID NO.695) |
| hGLP-1(7-38)NH₂; | |
| (Ser⁸,Aib³⁵,Arg^{25,34},Lys²⁶(N^{ε}-(2-(4-decyl-1-piperazine)-acetyl))) | (SEQ ID NO.696) |
| hGLP-1(7-36)NH₂; | |
| (Ser⁸,Aib³⁵,Arg^{25,34},Lys²⁶(N^{ε}-(2-(4-dodecyl-1-piperazine)-acetyl))) | (SEQ ID NO.697) |
| hGLP-1(7-36)NH₂; | |
| (Ser⁸,Aib³⁵,Arg^{25,34},Lys²⁶(N^{ε}-(2-(4-tetradecyl-1-piperazine)-acetyl))) | (SEQ ID NO.698) |
| hGLP-1(7-36)NH₂; | |
| (Ser⁸,Aib³⁵,Arg^{25,34},Lys²⁶(N^{ε}-(2-(4-hexadecyl-1-piperazine)-acetyl))) | (SEQ ID NO.699) |
| hGLP-1(7-36)NH₂; | |
| (Ser⁸,Aib³⁵,Arg^{25,26},Lys³⁴(N^{ε}-(2-(4-decyl-1-piperazine)-acetyl))) | (SEQ ID NO.700) |
| hGLP-1(7-36)NH₂; | |
| (Ser⁸,Aib³⁵,Arg^{25,26},Lys³⁴(N^{ε}-(2-(4-dodecyl-1-piperazine)-acetyl))) | (SEQ ID NO.701) |
| hGLP-1(7-36)NH₂; | |
| (Ser⁸,Aib³⁵,Arg^{25,26},Lys³⁴(N^{ε}-(2-(4-tetradecyl-1-piperazine)-acetyl))) | (SEQ ID NO.702) |
| hGLP-1(7-36)NH₂; | |
| (Ser⁸,Aib³⁵,Arg^{25,26},Lys³⁴(N^{ε}-(2-(4-hexadecyl-1-piperazine)-acetyl))) | (SEQ ID NO.703) |
| hGLP-1(7-36)NH₂; | |
| (Ser⁸,Aib³⁵,Arg^{25,26,34},Lys³⁶(N^{ε}-(2-(4-decyl-1-piperazine)-acetyl))) | (SEQ ID NO.704) |
| hGLP-1(7-36)NH₂; | |
| (Ser⁸,Aib³⁵,Arg2526,34,Lys³⁶(N^{ε}-(2-(4-dodecyl-1-piperazine)-acetyl))) | (SEQ ID NO.705) |
| hGLP-1(7-36)NH₂; | |
| (Ser⁸,Aib³⁵,Arg^{25,26,34},Lys³⁶(N^{ε}-(2-(4-tetradecyl-1-piperazine)-acetyl))) | (SEQ ID NO.706) |
| hGLP-1(7-36)NH₂; | |
| (Ser⁸,Aib³⁵,Arg^{25,26,34},Lys³⁶(N^{ε}-(2-(4-hexadecyl-1-piperazine)-acetyl))) | (SEQ ID NO.707) |
| hGLP-1(7-36)NH₂; | |
| (Ser⁸,Aib³⁵,Arg^{25,26,34},Lys³⁸(N^{ε}-(2-(4-decyl-1-piperazine)-acetyl))) | (SEQ ID NO.708) |
| hGLP-1(7-38)NH₂; | |
| (Ser⁸,Aib³⁵,Arg^{25,26,34},Lys³⁸(N^{ε}-(2-(4-dodecyl-1-piperazine)-acetyl))) | (SEQ ID NO.709) |
| hGLP-1(7-38)NH₂; | |
| (Ser⁸,Aib³⁵,Arg^{25,26,34},Lys³⁸(N^{ε}-(2-(4-tetradecyl-1-piperazine)-acetyl))) | (SEQ ID NO.710) |
| hGLP-1(7-38)NH₂; | |
| (Ser⁸,Aib³⁵,Arg^{25,26,34},Lys³⁸(N^{ε}-(2-(4-hexadecyl-1-piperazine)-acetyl))) | (SEQ ID NO.711) |
| hGLP-1(7-38)NH₂; | |
| (Ser⁸,Aib^{35,37},Arg^{25,26,34},Lys³⁸(N^{ε}-(2-(4-decyl-1-piperazine)-acetyl))) | (SEQ ID NO.712) |
| hGLP-1(7-38)NH₂; | |
| (Ser⁸,Aib^{35,37},Arg^{25,26,34},Lys³⁸(N^{ε}-(2-(4-dodecyl-1-piperazine)-acetyl))) | (SEQ ID NO.713) |
| hGLP-1(7-38)NH₂; | |
| (Ser⁸,Aib^{35,37},Arg^{25,26,34},Lys³⁸(N^{ε}-(2-(4-tetradecyl-1-piperazine)-acetyl))) | (SEQ ID NO.714) |
| hGLP-1(7-38)NH₂; | |
| (Ser⁸,Aib^{35,37},Arg^{25,26,34},Lys³⁸(N^{ε}-(2-(4-hexadecyl-1-piperazine)-acetyl))) | (SEQ ID NO.715) |
| hGLP-1(7-38)NH₂; | |
| (Ser⁸,Aib³⁵,Arg^{26,34},Lys³⁶(N^{ε}-decanoyl))hGLP-1(7-36)OH; | (SEQ ID NO.716) |
| (Ser⁸,Aib³⁵,Lys²⁵,Arg^{26,34},Lys³⁶(N^{ε}-decanoyl))hGLP-1(7-36)OH; | (SEQ ID NO.717) |
| (Ser⁸,Aib³⁵,Arg^{26,34},Ava³⁷,Ado³⁸)hGLP-1(7-38)NH₂; | (SEQ ID NO.718) |
| (Ser⁸,Aib³⁵,Arg^{26,34},Asp³⁷,Ava³⁸,Ado³⁹)hGLP-1(7-39)NH₂; | (SEQ ID NO.719) |
| (Ser⁸,Aib³⁵,Arg^{26,34},Aun³⁷)hGLP-1(7-37)NH₂; | (SEQ ID NO.720) |
| (Ser⁸,Aib^{17,35})hGLP-1(7-36)NH₂; | (SEQ ID NO.721) |
| (Ser⁸,Arg^{26,34},β-Ala³⁵,D-Asp³⁷,Ava³⁸,Aun³⁹)hGLP-1(7-39)NH₂; | (SEQ ID NO.722) |
| (Ser⁸,Glu^{22,23},β-Ala³⁵)hGLP-1(7-36)NH₂; | (SEQ ID NO.723) |
| (Ser⁸,Lys¹⁸,β-Ala³⁵)hGLP-1(7-36)NH₂; | (SEQ ID NO.724) |
| (Ser⁸,Leu²⁷,β-Ala³⁵)hGLP-1(7-36)NH₂; | (SEQ ID NO.725) |
| (Ser⁸,Lys³³,β-Ala³⁵)hGLP-1(7-36)NH₂; | (SEQ ID NO.726) |
| (Ser⁸,Lys¹⁸,Leu²⁷,β-Ala³⁵)hGLP-1(7-36)NH₂; | (SEQ ID NO.727) |
| (Ser⁸,D-Arg³⁶)hGLP-1(7-36)NH₂; | (SEQ ID NO.728) |
| (Ser⁸,β-Ala³⁵,D-Arg³⁷)hGLP-1(7-37)NH₂; | (SEQ ID NO.729) |
| (Ser⁸,Aib²⁷,β-Ala³⁵)hGLP-1(7-36)NH₂; | (SEQ ID NO.730) |
| (Ser⁸,Aib²⁷,β-Ala^{35,37},Arg³⁸)hGLP-1(7-38)NH₂; | (SEQ ID NO.731) |
| (Ser⁸,Aib²⁷,β-Ala^{35,37},Arg^{38,39})hGLP-1(7-39)NH₂; | (SEQ ID NO.732) |
| (Ser⁸,Lys¹⁸,27,β-Ala³⁵)hGLP-1(7-36)NH₂; | (SEQ ID NO.733) |
| (Ser⁸,Lys²⁷,β-Ala³⁵)hGLP-1(7-36)NH₂; | (SEQ ID NO.734) |
| (Ser⁸,β-Ala³⁵,Arg³⁸)hGLP-1(7-38)NH₂; | (SEQ ID NO.735) |
| (Ser⁸,Arg^{26,34},β-Ala³⁵)hGLP-1(7-36)NH₂; | (SEQ ID NO.736) |
| (Ser⁸,D-Arg³⁵)hGLP-1(7-36)NH₂; | (SEQ ID NO.737) |
| (Ser⁸,β-Ala³⁵,Arg³⁷)hGLP-1(7-37)NH₂; | (SEQ ID NO.738) |
| (Ser⁸,Phe³¹,β-Ala³⁵)hGLP-1(7-36)NH₂; | (SEQ ID NO.739) |
| (Ser⁸,Aib³⁵,Phe³¹)hGLP-1(7-36)NH₂; | (SEQ ID NO.740) |
| (Ser⁸,Aib³⁵,2-Nal³¹)hGLP-1(7-36)NH₂; | (SEQ ID NO.741) |
| (Ser⁸,Aib³⁵,2-Nal^{28,31})hGLP-1(7-36)NH₂; | (SEQ ID NO.742) |
| (Ser⁸,Aib³⁵,Arg^{26,34},2-Nal³¹)hGLP-1(7-36)NH₂; | (SEQ ID NO.743) |
| (Ser⁸,Aib³⁵,Arg^{26,34},Phe³¹)hGLP-1(7-36)NH₂; | (SEQ ID NO.744) |
| (Ser⁸,Aib³⁵,2-Nal^{19,31})hGLP-1(7-36)NH₂; | (SEQ ID NO.745) |
| (Ser⁸,Aib³⁵,2-Nal^{12,31})hGLP-1(7-36)NH₂; | (SEQ ID NO.746) |
| (Ser⁸,Aib³⁵,Lys³⁶(N^{ε}-decanoyl))hGLP-1(7-36)NH₂; | (SEQ ID NO.747) |
| (Ser⁸,Aib³⁵,Arg³⁴,Lys²⁶(N^{ε}-decanoyl))hGLP-1(7-36)NH₂; | (SEQ ID NO.748) |
| (Ser⁸,Aib³⁵,Arg^{26,34},Lys³⁶(N^{ε}-dodecanoyl))hGLP-1(7-36)NH₂; | (SEQ ID NO.749) |
| (Ser⁸,β-Ala³⁵,Ser³⁷(O-decanoyl))hGLP1(7-37)-NH₂; | (SEQ ID NO.750) |
| (Ser⁸,Aib²⁷,β-Ala^{35,37},Arg³⁸,Lys³⁹(N^{ε}-octanoyl))hGLP-1(7-39)NH₂; | (SEQ ID NO.751) |
| (Ser⁸,Arg^{26,34},β-Ala³⁵,Lys³⁷(N^{ε}-octanoyl))hGLP-1(7-37)NH₂; | (SEQ ID NO.752) |
| (Ser⁸,Arg^{26,34},β-Ala³⁵,Lys³⁷(N^{ε}-decanoyl))hGLP-1(7-37)NH₂; | (SEQ ID NO.753) |
| (Ser⁸,Arg^{26,34},β-Ala³⁵,Lys³⁷(N^{ε}-tetradecanoyl))hGLP-1(7-37)NH₂; | (SEQ ID NO.754) |
| (Ser⁸,Arg^{26,34},β-Ala³⁵,Lys³⁷(N^{ε}-dodecanoyl))hGLP-1(7-37)NH₂; | (SEQ ID NO.755) |
| (Ser⁸,Arg^{26,34},β-Ala³⁵,Lys³⁷(N^{ε}-dodecanoyl))hGLP-1(8-37)NH₂; | (SEQ ID NO.756) |
| (Ser⁸,Arg^{26,34},β-Ala³⁵,Lys³⁶(N^{ε}-Aec-decanoyl))hGLP-1(7-36)NH₂; | (SEQ ID NO.757) |
| (Ser⁸,Arg²⁶,Aib³⁵)hGLP-1(7-36)NH₂; | (SEQ ID NO.758) |
| (Ser⁸,Arg²⁶,Phe³¹,Aib³⁵)hGLP-1(7-36)NH₂; | (SEQ ID NO.759) |
| (Ser⁸,Arg²⁶,Phe³¹,β-Ala³⁵)hGLP-1(7-36)NH₂; | (SEQ ID NO.760) |
| (Ser⁸,Arg²⁶,β-Ala³⁵)hGLP-1(7-36)NH₂; | (SEQ ID NO.761) |
| (Ser⁸,Arg^{26,34},Phe³¹,β-Ala³⁵)hGLP-1(7-36)NH₂; | (SEQ ID NO.762) |
| (Ser⁸,Arg³⁴,Aib³⁵)hGLP-1(7-36)NH₂; | (SEQ ID NO.763) |
| (Ser⁸,Arg³⁴,β-Ala³⁵)hGLP-1(7-36)NH₂; | (SEQ ID NO.764) |
| (Ser⁸,Phe³¹,Arg³⁴,Aib³⁵)hGLP-1(7-36)NH₂; | (SEQ ID NO.765) |
| or | |
| (Ser⁸,Phe³¹,Arg³⁴,β-Ala³⁵)hGLP-1(7-36)NH₂; | (SEQ ID NO.766) |

or a pharmaceutically acceptable salt thereof.

13. A compound according to claim 11 wherein said compound is:

| | |
|---|---|
| (Gly⁸,Aib³⁵,A6c³²)hGLP-1(7-36)NH₂; | (SEQ ID NO.8) |
| (Gly⁸,Aib³⁵,Glu²³)hGLP-1(7-36)NH₂; | (SEQ ID NO.10) |
| (Gly⁸,Aib^{24,35})hGLP-1(7-36)NH₂; | (SEQ ID NO.11) |
| (Gly⁸,Aib³⁵,Glu²³,A6c³²)hGLP-1(7-36)NH₂; | (SEQ ID NO.28) |
| (Gly⁸,Glu²³,β-Ala³⁵)hGLP-1(7-36)NH₂; | (SEQ ID NO.34) |
| (Gly⁸,Aib³⁵,Arg^{26,34})hGLP-1(7-36)NH₂; | (SEQ ID NO.59) |
| (Gly⁸,Aib³⁵,Arg^{26,34},Lys³⁶(N^{ε}-octanoyl))hGLP-1(7-36)NH₂; | (SEQ ID NO.117) |
| (Gly⁸,Aib³⁵,Arg^{26,34},Lys³⁶(N^{ε}-decanoyl))hGLP-1(7-36)OH; | (SEQ ID NO.332) |
| (Gly⁸,Aib³⁵,Lys²⁵,Arg^{26,34},Lys³⁶(N^{ε}-decanoyl))hGLP-1(7-36)OH; | (SEQ ID NO.333) |
| (Gly⁸,Arg^{26,34},β-Ala³⁵,Lys³⁶(N^{ε}-Aec-decanoyl))hGLP-1(7-36)NH₂; | (SEQ ID NO.383) |
| (Gly⁸,Aib³⁵,Arg^{26,34},Ava³⁷,Ado³⁸)hGLP-1(7-38)NH₂; | (SEQ ID NO.334) |
| (Gly⁸,Aib³⁵,Arg^{26,34},Asp³⁷,Ava³⁵,Ado³⁹)hGLP-1(7-39)NH₂; | (SEQ ID NO.335) |
| (Gly⁸,Aib³⁵,Arg^{26,34},Aun³⁷)hGLP-1(7-37)NH₂; | (SEQ ID NO.336) |
| (Gly⁸,Aib^{17,35})hGLP-1(7-36)NH₂; | (SEQ ID NO.337) |
| (Gly⁸,Arg^{26,34},β-Ala³⁵,D-Asp³⁷,Ava³⁸,Aun³⁹)hGLP-1(7-39)NH₂; | (SEQ ID NO.338) |
| (Gly⁸,Glu^{22,23},β-Ala³⁵)hGLP-1(7-36)NH₂; | (SEQ ID NO.339) |
| (Gly⁸,Lys¹⁸,β-Ala³⁵)hGLP-1(7-36)NH₂; | (SEQ ID NO.340) |
| (Gly⁸,Leu²⁷,β-Ala³⁵)hGLP-1(7-36)NH₂; | (SEQ ID NO.341) |
| (Gly⁸,Lys³³,β-Ala³⁵)hGLP-1(7-36)NH₂; | (SEQ ID NO.342) |
| (Gly⁸,Lys¹⁸,Leu²⁷,β-Ala³⁵)hGLP-1(7-36)NH₂; | (SEQ ID NO.343) |
| (Gly⁸,D-Arg³⁶)hGLP-1(7-36)NH₂; | (SEQ ID NO.344) |
| (Gly⁸,β-Ala³⁵,D-Arg³⁷)hGLP-1(7-37)NH₂; | (SEQ ID NO.345) |
| (Gly⁸,Aib²⁷,β-Ala³⁵)hGLP-1(7-36)NH₂; | (SEQ ID NO.346) |
| (Gly⁸,Aib²⁷,β-Ala^{35,37},Arg³⁸)hGLP-1(7-38)NH₂; | (SEQ ID NO.347) |
| (Gly⁸,Aib²⁷,β-Ala^{35,37},Arg^{38,39})hGLP-1(7-39)NH₂; | (SEQ ID NO.348) |
| (Gly⁸,Lys^{18,27},β-Ala³⁵)hGLP-1(7-36)NH₂; | (SEQ ID NO.349) |
| (Gly⁸,Lys²⁷,β-Ala³⁵)hGLP-1(7-36)NH₂; | (SEQ ID NO.350) |
| (Gly⁸,β-Ala³⁵,Arg³⁸)hGLP-1(7-38)NH₂; | (SEQ ID NO.351) |
| (Gly⁸,Arg^{26,34},β-Ala³⁵,)hGLP-1(7-36)NH₂; | (SEQ ID NO.352) |
| (Gly⁸,D-Arg³⁵)hGLP-1(7-36)NH₂; | (SEQ ID NO.353) |
| (Gly⁸,β-Ala³⁵,Arg³⁷)hGLP-1(7-37)NH₂; | (SEQ ID NO.354) |
| (Gly⁸,Phe³¹,β-Ala³⁵)hGLP-1(7-36)NH₂; | (SEQ ID NO.355) |
| (Gly⁸,Aib³⁵,Phe³¹)hGLP-1(7-36)NH₂; | (SEQ ID NO.356) |
| (Gly⁸,Aib³⁵,2-Nal³¹)hGLP-1(7-36)NH₂; | (SEQ ID NO.357) |
| (Gly⁸,Aib³⁵,2-Nal^{28,31})hGLP-1(7-36)NH₂; | (SEQ ID NO.358) |
| (Gly⁸,Aib³⁵,Arg^{26,34},2-Nal³¹)hGLP-1(7-36)NH₂; | (SEQ ID NO.359) |
| (Gly⁸,Aib³⁵,Arg^{26,34},Phe³¹)hGLP-1(7-36)NH₂; | (SEQ ID NO.360) |
| (Gly⁸,Aib³⁵,2-Nal^{19,31})hGLP-1(7-36)NH₂; | (SEQ ID NO.361) |
| (Gly⁸,Aib³⁵,2-Nal^{12,31})hGLP-1(7-36)NH₂; | (SEQ ID NO.362) |
| (Gly⁸,Aib³⁵,Lys³⁶(N^{ε}-decanoyl))hGLP-1(7-36) NH₂; | (SEQ ID NO.99) |
| (Gly⁸,Aib³⁵,Arg³⁴,Lys²⁶(N^{ε}-decanoyl))hGLP-1(7-36)NH₂; | (SEQ ID NO.364) |
| (Gly⁸,Aib³⁵,Arg^{26,34},Lys³⁶(N^{ε}-dodecanoyl))hGLP-1(7-36)NH₂; | (SEQ ID NO.365) |
| (Gly⁸,β-Ala³⁵,Ser³⁷(O-decanoyl))hGLP1(7-37)-NH₂; | (SEQ ID NO.384) |
| (Gly⁸,Aib²⁷,β-Ala^{35,37},Arg³⁸,Lys³⁹(N^{ε}-octanoyl))hGLP-1(7-39)NH₂; | (SEQ ID NO.367) |
| (Gly⁸,Arg^{26,34},β-Ala³⁵,Lys³⁷(N^{ε}-octanoyl))hGLP-1(7-37)NH₂; | (SEQ ID NO.368) |
| (Gly⁸,Arg^{26,34},β-Ala³⁵,Lys³⁷(N^{ε}-decanoyl))hGLP-1(7-37)NH₂; | (SEQ ID NO.369) |
| or | |
| (Gly⁸,Arg^{26,34},β-Ala³⁵,Lys³⁷(N^{ε}-tetradecanoyl))hGLP-1(7-37)NH₂; | (SEQ ID NO.370) |

or a pharmaceutically acceptable salt thereof.

14. A compound according to claim 12 wherein said compound is:

| | |
|---|---|
| (Ser⁸,Aib³⁵,A6c³²)hGLP-1(7-36)NH₂; | (SEQ ID NO.392) |
| (Ser⁸,Aib³⁵,Glu²³)hGLP-1(7-36)NH₂; | (SEQ ID NO.394) |
| (Ser⁸,Aib^{24,35})hGLP-1(7-36)NH₂; | (SEQ ID NO.395) |
| (Ser⁸,Aib³⁵,Glu²³,A6c³²)hGLP-1(7-36)NH₂; | (SEQ ID NO.412) |
| (Ser⁸,Glu²³,β-Ala³⁵)hGLP-1(7-36)NH₂; | (SEQ ID NO.418) |
| (Ser⁸,Aib³⁵,Arg^{26,34})hGLP-1(7-36)NH₂; | (SEQ ID NO.443) |
| (Ser⁸,Aib³⁵,Arg^{26,34},Lys³⁶(N^{ε}-octanoyl))hGLP-1(7-36)NH₂; | (SEQ ID NO.501) |
| (Ser⁸,Aib³⁵,Arg^{26,34},Lys³⁶(N^{ε}-decanoyl))hGLP-1(7-36)OH; | (SEQ ID NO.716) |
| (Ser⁸,Aib³⁵,Lys²⁵,Arg^{26,34},Lys³⁶(N^{ε}-decanoyl))hGLP-1(7-36)OH; | (SEQ ID NO.717) |
| (Ser⁸,Arg^{26,34},β-Ala³⁵,Lys³⁶(N^{ε}-Aec-decanoyl))hGLP-1(7-36)NH₂; | (SEQ ID NO.757) |
| (Ser⁸,Aib³⁵,Arg^{26,34},Ava³⁷,Ado³⁸)hGLP-1(7-38)NH₂; | (SEQ ID NO.718) |
| (Ser⁸,Aib³⁵,Arg^{26,34},Asp³⁷,Ava³⁵,Ado³⁹)hGLP-1(7-39)NH₂; | (SEQ ID NO.719) |
| (Ser⁸,Aib³⁵,Arg^{26,34},Aun³⁷)hGLP-1(7-37)NH₂; | (SEQ ID NO.720) |
| (Ser⁸,Aib^{17,35})hGLP-1(7-36)NH₂; | (SEQ ID NO.389) |
| (Ser⁸,Arg^{26,34},β-Ala³⁵,D-Asp³⁷,Ava³⁸,Aun³⁹)hGLP-1(7-39)NH₂; | (SEQ ID NO.722) |
| (Ser⁸,Glu^{22,23},β-Ala³⁵)hGLP-1(7-36)NH₂; | (SEQ ID NO.723) |
| (Ser⁸,Lys¹⁸,β-Ala³⁵)hGLP-1(7-36)NH₂; | (SEQ ID NO.724) |
| (Ser⁸,Leu²⁷,β-Ala³⁵)hGLP-1(7-36)NH₂; | (SEQ ID NO.725) |
| (Ser⁸,Lys³³,β-Ala³⁵)hGLP-1(7-36)NH₂; | (SEQ ID NO.726) |
| (Ser⁸,Lys¹⁸,Leu²⁷,β-Ala³⁵)hGLP-1(7-36)NH₂; | (SEQ ID NO.727) |
| (Ser⁸,D-Arg³⁶)hGLP-1(7-36)NH₂; | (SEQ ID NO.728) |
| (Ser⁸,β-Ala³⁵,D-Arg³⁷)hGLP-1(7-37)NH₂; | (SEQ ID NO.729) |
| (Ser⁸,Aib²⁷,β-Ala³⁵)hGLP-1(7-36)NH₂; | (SEQ ID NO.730) |
| (Ser⁸,Aib²⁷,β-Ala^{35,37},Arg³⁸)hGLP-1(7-38)NH₂; | (SEQ ID NO.731) |
| (Ser⁸,Aib²⁷,β-Ala^{35,37},Arg^{38,39})hGLP-1(7-39)NH₂; | (SEQ ID NO.732) |
| (Ser⁸,Lys^{18,27},β-Ala³⁵)hGLP-1(7-36)NH₂; | (SEQ ID NO.733) |
| (Ser⁸,Lys²⁷,β-Ala³⁵)hGLP-1(7-36)NH₂; | (SEQ ID NO.734) |
| (Ser⁸,β-Ala³⁵,Arg³⁸)hGLP-1(7-38)NH₂; | (SEQ ID NO.735) |
| (Ser⁸,Arg^{26,34},β-Ala³⁵,)hGLP-1(7-36)NH₂; | (SEQ ID NO.736) |
| (Ser⁸,D-Arg³⁵)hGLP-1(7-36)NH₂; | (SEQ ID NO.737) |
| (Ser⁸,β-Ala³⁵,Arg³⁷)hGLP-1(7-37)NH₂; | (SEQ ID NO.738) |
| (Ser⁸,Phe³¹,β-Ala³⁵)hGLP-1(7-36)NH₂; | (SEQ ID NO.739) |
| (Ser⁸,Aib³⁵,Phe³¹)hGLP-1(7-36)NH₂; | (SEQ ID NO.740) |
| (Ser⁸,Aib³⁵,2-Nal³¹)hGLP-1(7-36)NH₂; | (SEQ ID NO.741) |
| (Ser⁸,Aib³⁵,2-Nal^{28,31})hGLP-1(7-36)NH₂; | (SEQ ID NO.742) |
| (Ser⁸,Aib³⁵,Arg^{26,34},2-Nal³¹)hGLP-1(7-36)NH₂; | (SEQ ID NO.743) |
| (Ser⁸,Aib³⁵,Arg^{26,34},Phe³¹)hGLP-1(7-36)NH₂; | (SEQ ID NO.744) |
| (Ser⁸,Aib³⁵,2-Nal^{19,31})hGLP-1(7-36)NH₂; | (SEQ ID NO.745) |
| (Ser⁸,Aib³⁵,2-Nal^{12,31})hGLP-1(7-36)NH₂; | (SEQ ID NO.746) |
| (Ser⁸,Aib³⁵,Lys³⁶(N^{ε}-decanoyl))hGLP-1(7-36) NH₂; | (SEQ ID NO.483) |
| (Ser⁸,Aib³⁵,Arg³⁴,Lys²⁶(N^{ε}-decanoyl))hGLP-1(7-36)NH₂; | (SEQ ID NO.748) |
| (Ser⁸,Aib³⁵,Arg^{26,34},Lys³⁶(N^{ε}-dodecanoyl))hGLP-1(7-36)NH₂; | (SEQ ID NO.749) |
| (Ser⁸,β-Ala³⁵,Ser³⁷(O-decanoyl))hGLP1(7-37)-NH₂; | (SEQ ID NO.539) |
| (Ser⁸,Aib²⁷,β-Ala^{35,37},Arg³⁸,Lys³⁹(N^{ε}-octanoyl))hGLP-1(7-39)NH₂; | (SEQ ID NO.751) |
| (Ser⁸,Arg^{26,34},β-Ala³⁵,Lys³⁷(N^{ε}-octanoyl))hGLP-1(7-37)NH₂; | (SEQ ID NO.752) |
| (Ser⁸,Arg^{26,34},β-Ala³⁵,Lys³⁷(N^{ε}-decanoyl))hGLP-1(7-37)NH₂; | (SEQ ID.NO.753) |
| or | |
| (Ser⁸,Arg^{26,34},β-Ala³⁵,Lys³⁷(N^{ε}-tetradecanoyl))hGLP-1(7-37)NH₂; | (SEQ ID NO.754) |

or a pharmaceutically acceptable salt thereof.

15. A compound according to claim 1, wherein said compound is:

| | |
|---|---|
| Ser⁸,Aib³⁵)hGLP-1(7-36)NH₂; | (SEQ ID NO.767) |
| (Abu⁸,β-Ala³⁵)hGLP-1(7-36)NH₂; | (SEQ ID NO.768) |
| (Val⁸,β-Ala³⁵)hGLP-1(7-36)NH₂; | (SEQ ID NO.769) |
| (β-Ala³⁵)hGLP-1(7-36)NH₂; | (SEQ ID NO.770) |
| (Abu⁸,Aib³⁵)hGLP-1(7-36)NH₂; | (SEQ ID NO.771) |
| (Val⁸,Aib³⁵)hGLP-1(7-36)NH₂; | (SEQ ID NO.772) |
| or | |
| (β-Ala⁸,Aib³⁵)hGLP-1(7-36)NH₂; | (SEQ ID NO.773) |

or a pharmaceutically acceptable salt thereof.

16. A compound according to claim 15, wherein said compound is:

| | |
|---|---|
| Ser⁸, Aib³⁵)hGLP-1(7-36)NH₂; | (SEQ ID NO.767) |
| (Abu⁸,β-Ala³⁵)hGLP-1(7-36)NH₂; | (SEQ ID NO.768) |
| or | |
| (Abu⁸,Aib³⁵)hGLP-1(7-36)NH₂; | (SEQ ID NO.771) |

or a pharmaceutically acceptable salt thereof.

17. A compound according to claim 16, wherein said compound is:

| | |
|---|---|
| Ser⁸,Aib³⁵)hGLP-1(7-36)NH₂; | (SEQ ID NO.767) |

or a pharmaceutically acceptable salt thereof.

18. A pharmaceutical composition comprising an effective amount of a compound according to claim 1 or a pharmaceutically acceptable salt thereof and a pharmaceutically acceptable carrier or diluent.

19. A method of eliciting an agonist effect from a GLP-1 receptor in a subject in need thereof which comprises administering to said subject an effective amount of a compound according to claim 1 or a pharmaceutically acceptable salt thereof.

20. A method of treating a disease selected from the group consisting of Type I diabetes, Type II diabetes, obesity, glucagonomas, secretory disorders of the airway, metabolic disorder, arthritis, osteoporosis, central nervous system disease, restenosis and neurodegenerative disease, in a subject in need thereof which comprises administering to said subject an effective amount of a compound according to claim 1 or a pharmaceutically acceptable salt thereof.

21. A method according to claim 20 wherein said disease is Type I diabetes or Type II diabetes.

The application's sequence listing, which the Patent Office published only in electronic form, follows.

SEQUENCE LISTING (781 sequences)

SEQ ID NO: 1 - protein, 30 aa, Artificial Sequence
  Description of Artificial Sequence: Synthetic modified hGLP-1 peptide
  MOD_RES (1)..(1): N-Me-His
  MOD_RES (29)..(29): Aib
  c-term amidation
XGEGTFTSDVSSYLEGQAAKEFIAWLVKXR

SEQ ID NO: 2 - protein, 30 aa, Artificial Sequence; identical to SEQ ID NO: 1
  Description of Artificial Sequence: Synthetic modified hGLP-1 peptide
  MOD_RES (1)..(1): N-Me-His
  MOD_RES (29)..(29): Beta-Ala
  c-term amidation

SEQ ID NO: 3 - protein, 30 aa, Artificial Sequence
  Description of Artificial Sequence: Synthetic modified hGLP-1 peptide
  MOD_RES (1)..(1): N-Me-His
  MOD_RES (29)..(29): Aib
  c-term amidation
XGEGTFTSDVSSYLEGQAAREFIAWLVRXR

SEQ ID NO: 4 - protein, 30 aa, Artificial Sequence; identical to SEQ ID NO: 3
  Description of Artificial Sequence: Synthetic modified hGLP-1 peptide
  MOD_RES (1)..(1): N-Me-His
  MOD_RES (29)..(29): Beta-Ala
  c-term amidation

SEQ ID NO: 5 - protein, 30 aa, Artificial Sequence
  Description of Artificial Sequence: Synthetic modified hGLP-1 peptide
  MOD_RES (29)..(29): A6c
  c-term amidation
HGEGTFTSDVSSYLEGQAAKEFIAWLVKXR

SEQ ID NO: 6 - protein, 30 aa, Artificial Sequence; identical to SEQ ID NO: 5
  Description of Artificial Sequence: Synthetic modified hGLP-1 peptide
  MOD_RES (29)..(29): A5c
  c-term amidation

SEQ ID NO: 7 - protein, 30 aa, Artificial Sequence; identical to SEQ ID NO: 5
  Description of Artificial Sequence: Synthetic modified hGLP-1 peptide
  MOD_RES (29)..(29): D-Ala
  c-term amidation

SEQ ID NO: 8 - protein, 30 aa, Artificial Sequence
  Description of Artificial Sequence: Synthetic modified hGLP-1 peptide
  MOD_RES (26)..(26): A6c
  MOD_RES (29)..(29): Aib
  c-term amidation
HGEGTFTSDVSSYLEGQAAKEFIAWXVKXR

SEQ ID NO: 9 - protein, 30 aa, Artificial Sequence; identical to SEQ ID NO: 8
  Description of Artificial Sequence: Synthetic modified hGLP-1 peptide
  MOD_RES (26)..(26): A5c
  MOD_RES (29)..(29): Aib
  c-term amidation

SEQ ID NO: 10 - protein, 30 aa, Artificial Sequence
  Description of Artificial Sequence: Synthetic modified hGLP-1 peptide
  MOD_RES (29)..(29): Aib
  c-term amidation
HGEGTFTSDVSSYLEGEAAKEFIAWLVKXR

SEQ ID NO: 11 - protein, 30 aa, Artificial Sequence
  Description of Artificial Sequence: Synthetic modified hGLP-1 peptide
  MOD_RES (18)..(18): Aib
  MOD_RES (29)..(29): Aib
  c-term amidation
HGEGTFTSDVSSYLEGQXAKEFIAWLVKXR

SEQ ID NO: 12 - protein, 30 aa, Artificial Sequence
  Description of Artificial Sequence: Synthetic modified hGLP-1 peptide
  MOD_RES (24)..(24): Aib
  MOD_RES (29)..(29): Aib
  c-term amidation
HGEGTFTSDVSSYLEGQAAKEFIXWLVKXR

SEQ ID NO: 13 - protein, 30 aa, Artificial Sequence
  Description of Artificial Sequence: Synthetic modified hGLP-1 peptide
  MOD_RES (19)..(19): Aib
  MOD_RES (29)..(29): Aib
  c-term amidation
HGEGTFTSDVSSYLEGQAXKEFIAWLVKXR

SEQ ID NO: 14 - protein, 30 aa, Artificial Sequence
  Description of Artificial Sequence: Synthetic modified hGLP-1 peptide
  MOD_RES (10)..(10): A6c
  MOD_RES (14)..(14): A6c
  MOD_RES (29)..(29): Aib
  c-term amidation
HGEGTFTSDXSSYXEGQAAKEFIAWLVKXR

SEQ ID NO: 15 - protein, 30 aa, Artificial Sequence
  Description of Artificial Sequence: Synthetic modified hGLP-1 peptide
  MOD_RES (10)..(10): A6c
  MOD_RES (23)..(23): A6c
  MOD_RES (26)..(26): A6c
  MOD_RES (29)..(29): Aib
  c-term amidation
HGEGTFTSDXSSYLEGQAAKEFXAWXVKXR

SEQ ID NO: 16 - protein, 30 aa, Artificial Sequence
  Description of Artificial Sequence: Synthetic modified hGLP-1 peptide
  MOD_RES (14)..(14): A6c
  MOD_RES (26)..(26): A6c
  MOD_RES (29)..(29): Aib
  c-term amidation
HGEGTFTSDVSSYXEGQAAKEFIAWXVKXR

SEQ ID NO: 17 - protein, 30 aa, Artificial Sequence
  Description of Artificial Sequence: Synthetic modified hGLP-1 peptide
  MOD_RES (14)..(14): A6c
  MOD_RES (29)..(29): Aib
  c-term amidation
HGEGTFTSDVSSYXEGQAAKEFIAWLVKXR

SEQ ID NO: 18 - protein, 30 aa, Artificial Sequence
  Description of Artificial Sequence: Synthetic modified hGLP-1 peptide
  MOD_RES (29)..(29): Aib
  c-term amidation
HGEGTFTSDVSSYLEGQAKKEFIAWLVKXR

SEQ ID NO: 19 - protein, 30 aa, Artificial Sequence
  Description of Artificial Sequence: Synthetic modified hGLP-1 peptide
  MOD_RES (14)..(14): A6c
  MOD_RES (18)..(18): Aib
  MOD_RES (29)..(29): Aib
  c-term amidation
HGEGTFTSDVSSYXEGQXAKEFIAWLVKXR

SEQ ID NO: 20 - protein, 30 aa, Artificial Sequence
  Description of Artificial Sequence: Synthetic modified hGLP-1 peptide
  MOD_RES (23)..(23): A6c
  MOD_RES (26)..(26): A6c
  MOD_RES (29)..(29): Aib
  c-term amidation
HGEGTFTSDVSSYLEGQAAKEFXAWXVKXR

SEQ ID NO: 21 - protein, 30 aa, Artificial Sequence
  Description of Artificial Sequence: Synthetic modified hGLP-1 peptide
  MOD_RES (18)..(18): Aib
  MOD_RES (23)..(23): A6c
  MOD_RES (26)..(26): A6c
  MOD_RES (29)..(29): Aib
  c-term amidation
HGEGTFTSDVSSYLEGQXAKEFXAWXVKXR

SEQ ID NO: 22 - protein, 30 aa, Artificial Sequence
  Description of Artificial Sequence: Synthetic modified hGLP-1 peptide
  MOD_RES (6)..(6): A6c
  MOD_RES (29)..(29): Aib
  c-term amidation
HGEGTXTSDVSSYLEGQAAKEFIAWLVKXR

SEQ ID NO: 23 - protein, 30 aa, Artificial Sequence; identical to SEQ ID NO: 17
  Description of Artificial Sequence: Synthetic modified hGLP-1 peptide
  MOD_RES (14)..(14): Cha
  MOD_RES (29)..(29): Aib
  c-term amidation

SEQ ID NO: 24 - protein, 30 aa, Artificial Sequence
  Description of Artificial Sequence: Synthetic modified hGLP-1 peptide
  MOD_RES (27)..(27): A6c
  MOD_RES (29)..(29): Aib
  c-term amidation
HGEGTFTSDVSSYLEGQAAKEFIAWLXKXR

SEQ ID NO: 25 - protein, 30 aa, Artificial Sequence; identical to SEQ ID NO: 14
  Description of Artificial Sequence: Synthetic modified hGLP-1 peptide
  MOD_RES (10)..(10): A6c
  MOD_RES (14)..(14): A6c
  MOD_RES (29)..(29): Beta-Ala
  c-term amidation

SEQ ID NO: 26 - protein, 30 aa, Artificial Sequence
  Description of Artificial Sequence: Synthetic modified hGLP-1 peptide
  MOD_RES (16)..(16): Beta-Ala
  MOD_RES (29)..(29): Aib
  c-term amidation
HGEGTFTSDVSSYLEXQAAKEFIAWLVKXR

SEQ ID NO: 27 - protein, 30 aa, Artificial Sequence; identical to SEQ ID NO: 26
  Description of Artificial Sequence: Synthetic modified hGLP-1 peptide
  MOD_RES (16)..(16): Aib
  MOD_RES (29)..(29): Aib
  c-term amidation

SEQ ID NO: 28 - protein, 30 aa, Artificial Sequence
  Description of Artificial Sequence: Synthetic modified hGLP-1 peptide
  MOD_RES (26)..(26): A6c
  MOD_RES (29)..(29): Aib
  c-term amidation
HGEGTFTSDVSSYLEGEAAKEFIAWXVKXR

SEQ ID NO: 29 - protein, 30 aa, Artificial Sequence
  Description of Artificial Sequence: Synthetic modified hGLP-1 peptide
  MOD_RES (18)..(18): Aib
  MOD_RES (26)..(26): A6c
  MOD_RES (29)..(29): Aib
  c-term amidation
HGEGTFTSDVSSYLEGEXAKEFIAWXVKXR

SEQ ID NO: 30 - protein, 30 aa, Artificial Sequence
  Description of Artificial Sequence: Synthetic modified hGLP-1 peptide
  MOD_RES (18)..(19): Aib
  MOD_RES (26)..(26): Ac6
  MOD_RES (29)..(29): Aib
  c-term amidation
HGEGTFTSDVSSYLEGEXXKEFIAWXVKXR

SEQ ID NO: 31 - protein, 30 aa, Artificial Sequence
  Description of Artificial Sequence: Synthetic modified hGLP-1 peptide
  MOD_RES (10)..(10): A6c
  MOD_RES (14)..(14): A6c
  MOD_RES (18)..(19): Aib
  MOD_RES (26)..(26): A6c
  MOD_RES (29)..(29): Aib
  c-term amidation
HGEGTFTSDXSSYXEGEXXKEFIAWXVKXR

SEQ ID NO: 32 - protein, 30 aa, Artificial Sequence; identical to SEQ ID NO: 8
  Description of Artificial Sequence: Synthetic modified hGLP-1 peptide
  MOD_RES (26)..(26): A6c
  MOD_RES (29)..(29): Beta-Ala
  c-term amidation

SEQ ID NO: 33 - protein, 30 aa, Artificial Sequence; identical to SEQ ID NO: 8
  Description of Artificial Sequence: Synthetic modified hGLP-1 peptide
  MOD_RES (26)..(26): A5c
  MOD_RES (29)..(29): Beta-Ala
  c-term amidation

SEQ ID NO: 34 - protein, 30 aa, Artificial Sequence; identical to SEQ ID NO: 10
  Description of Artificial Sequence: Synthetic modified hGLP-1 peptide
  MOD_RES (29)..(29): Beta-Ala
  c-term amidation

SEQ ID NO: 35 - protein, 30 aa, Artificial Sequence; identical to SEQ ID NO: 11
  Description of Artificial Sequence: Synthetic modified hGLP-1 peptide
  MOD_RES (18)..(18): Aib
  MOD_RES (29)..(29): Beta-Ala
  c-term amidation

SEQ ID NO: 36 - protein, 30 aa, Artificial Sequence; identical to SEQ ID NO: 12
  Description of Artificial Sequence: Synthetic modified hGLP-1 peptide
  MOD_RES (24)..(24): Aib
  MOD_RES (29)..(29): Beta-Ala
  c-term amidation

SEQ ID NO: 37 - protein, 30 aa, Artificial Sequence; identical to SEQ ID NO: 13
  Description of Artificial Sequence: Synthetic modified hGLP-1 peptide
  MOD_RES (19)..(19): Aib
  MOD_RES (29)..(29): Beta-Ala
  c-term amidation

SEQ ID NO: 38 - protein, 30 aa, Artificial Sequence; identical to SEQ ID NO: 15
  Description of Artificial Sequence: Synthetic modified hGLP-1 peptide
  MOD_RES (10)..(10): A6c
  MOD_RES (23)..(23): A6c
  MOD_RES (26)..(26): A6c
  MOD_RES (29)..(29): Beta-Ala
  c-term amidation

SEQ ID NO: 39 - protein, 30 aa, Artificial Sequence; identical to SEQ ID NO: 16
  Description of Artificial Sequence: Synthetic modified hGLP-1 peptide
  MOD_RES (14)..(14): A6c
  MOD_RES (26)..(26): A6c
  MOD_RES (29)..(29): Beta-Ala
  c-term amidation

SEQ ID NO: 40 - protein, 30 aa, Artificial Sequence; identical to SEQ ID NO: 17
  Description of Artificial Sequence: Synthetic modified hGLP-1 peptide
  MOD_RES (14)..(14): A6c
  MOD_RES (29)..(29): Beta-Ala
  c-term amidation

SEQ ID NO: 41 - protein, 30 aa, Artificial Sequence; identical to SEQ ID NO: 18
  Description of Artificial Sequence: Synthetic modified hGLP-1 peptide
  MOD_RES (29)..(29): B-Ala
  c-term amidation

SEQ ID NO: 42 - protein, 30 aa, Artificial Sequence; identical to SEQ ID NO: 19
  Description of Artificial Sequence: Synthetic modified hGLP-1 peptide
  MOD_RES (14)..(14): A6c
  MOD_RES (18)..(18): Aib
  MOD_RES (29)..(29): Beta-Ala
  c-term amidation

SEQ ID NO: 43 - protein, 30 aa, Artificial Sequence; identical to SEQ ID NO: 20
  Description of Artificial Sequence: Synthetic modified hGLP-1 peptide
  MOD_RES (23)..(23): A6c
  MOD_RES (26)..(26): A6c
  MOD_RES (29)..(29): Beta-Ala
  c-term amidation

SEQ ID NO: 44 - protein, 30 aa, Artificial Sequence; identical to SEQ ID NO: 21
  Description of Artificial Sequence: Synthetic modified hGLP-1 peptide
  MOD_RES (18)..(18): Aib
  MOD_RES (23)..(23): A6c
  MOD_RES (26)..(26): A6c
  MOD_RES (29)..(29): Beta-Ala
  c-term amidation

SEQ ID NO: 45 - protein, 30 aa, Artificial Sequence; identical to SEQ ID NO: 22
  Description of Artificial Sequence: Synthetic modified hGLP-1 peptide
  MOD_RES (6)..(6): A6c
  MOD_RES (29)..(29): Beta-Ala
  c-term amidation

SEQ ID NO: 46 - protein, 30 aa, Artificial Sequence; identical to SEQ ID NO: 17
  Description of Artificial Sequence: Synthetic modified hGLP-1 peptide
  MOD_RES (14)..(14): Cha
  MOD_RES (29)..(29): Beta-Ala
  c-term amidation

SEQ ID NO: 47 - protein, 30 aa, Artificial Sequence; identical to SEQ ID NO: 24
  Description of Artificial Sequence: Synthetic modified hGLP-1 peptide
  MOD_RES (27)..(27): A6c
  MOD_RES (29)..(29): Beta-Ala
  c-term amidation

SEQ ID NO: 48 - protein, 30 aa, Artificial Sequence; identical to SEQ ID NO: 26
  Description of Artificial Sequence: Synthetic modified hGLP-1 peptide
  MOD_RES (16)..(16): Beta-Ala
  MOD_RES (29)..(29): Beta-Ala
  c-term amidation

SEQ ID NO: 49 - protein, 30 aa, Artificial Sequence; identical to SEQ ID NO: 26
  Description of Artificial Sequence: Synthetic modified hGLP-1 peptide
  MOD_RES (16)..(16): Aib
  MOD_RES (29)..(29): Beta-Ala
  c-term amidation

SEQ ID NO: 50 - protein, 30 aa, Artificial Sequence; identical to SEQ ID NO: 28
  Description of Artificial Sequence: Synthetic modified hGLP-1 peptide
  MOD_RES (26)..(26): A6c
  MOD_RES (29)..(29): Beta-Ala
  c-term amidation

SEQ ID NO: 51 - protein, 30 aa, Artificial Sequence; identical to SEQ ID NO: 29
  Description of Artificial Sequence: Synthetic modified hGLP-1 peptide
  MOD_RES (18)..(18): Aib
  MOD_RES (26)..(26): A6c
  MOD_RES (29)..(29): Beta-Ala
  c-term amidation

SEQ ID NO: 52 - protein, 30 aa, Artificial Sequence
  Description of Artificial Sequence: Synthetic modified hGLP-1 peptide
  MOD_RES (18)..(18): Aib
  MOD_RES (26)..(26): A6c
  MOD_RES (28)..(28): Lys(N-octanoyl)
  MOD_RES (29)..(29): Beta-Ala
  c-term amidation
HGEGTFTSDVSSYLEGEXAKEFIAWXVXXR

SEQ ID NO: 53 - protein, 30 aa, Artificial Sequence; identical to SEQ ID NO: 30
  Description of Artificial Sequence: Synthetic modified hGLP-1 peptide
  MOD_RES (18)..(19): Aib
  MOD_RES (26)..(26): A6c
  MOD_RES (29)..(29): Beta-Ala
  c-term amidation

SEQ ID NO: 54 - protein, 30 aa, Artificial Sequence; identical to SEQ ID NO: 31
  Description of Artificial Sequence: Synthetic modified hGLP-1 peptide
  MOD_RES (10)..(10): A6c
  MOD_RES (14)..(14): A6c
  MOD_RES (18)..(19): Aib
  MOD_RES (26)..(26): A6c
  MOD_RES (29)..(29): Beta-Ala
  c-term amidation

SEQ ID NO: 55 - protein, 30 aa, Artificial Sequence
  Description of Artificial Sequence: Synthetic modified hGLP-1 peptide
  MOD_RES (29)..(29): Aib
  MOD_RES (30)..(30): D-Arg
  c-term amidation
HGEGTFTSDVSSYLEGQAAKEFIAWLVKXX

SEQ ID NO: 56 - protein, 30 aa, Artificial Sequence; identical to SEQ ID NO: 55
  Description of Artificial Sequence: Synthetic modified hGLP-1 peptide
  MOD_RES (29)..(29): Aib
  MOD_RES (30)..(30): D-Lys
  c-term amidation

SEQ ID NO: 57 - protein, 30 aa, Artificial Sequence; identical to SEQ ID NO: 55
  Description of Artificial Sequence: Synthetic modified hGLP-1 peptide
  MOD_RES (29)..(29): Beta-Ala
  MOD_RES (30)..(30): D-Arg
  c-term amidation

SEQ ID NO: 58 - protein, 30 aa, Artificial Sequence; identical to SEQ ID NO: 55
  Description of Artificial Sequence: Synthetic modified hGLP-1 peptide
  MOD_RES (29)..(29): Beta-Ala
  MOD_RES (30)..(30): D-Lys
  c-term amidation

SEQ ID NO: 59 - protein, 30 aa, Artificial Sequence
  Description of Artificial Sequence: Synthetic modified hGLP-1 peptide
  MOD_RES (29)..(29): Aib
  c-term amidation
HGEGTFTSDVSSYLEGQAAREFIAWLVRXR

SEQ ID NO: 60 - protein, 30 aa, Artificial Sequence; identical to SEQ ID NO: 59
  Description of Artificial Sequence: Synthetic modified hGLP-1 peptide
  MOD_RES (29)..(29): Beta-Ala
  c-term amidation

SEQ ID NO: 61 - protein, 30 aa, Artificial Sequence
  Description of Artificial Sequence: Synthetic modified hGLP-1 peptide
  MOD_RES (29)..(29): Aib
  c-term amidation
HGEGTFTSDVSSYLEGQARREFIAWLVRXR

SEQ ID NO: 62 - protein, 30 aa, Artificial Sequence; identical to SEQ ID NO: 61
  Description of Artificial Sequence: Synthetic modified hGLP-1 peptide
  MOD_RES (29)..(29): Beta-Ala
  c-term amidation

SEQ ID NO: 63 - protein, 30 aa, Artificial Sequence
  Description of Artificial Sequence: Synthetic modified hGLP-1 peptide
  MOD_RES (29)..(29): Beta-Ala
  MOD_RES (30)..(30): Lys(N-tetradecanoyl)
HGEGTFTSDVSSYLEGQAAREFIAWLVRXX

SEQ ID NO: 64 - protein, 31 aa, Artificial Sequence
  Description of Artificial Sequence: Synthetic modified hGLP-1 peptide
  MOD_RES (29)..(29): Aib
  MOD_RES (30)..(30): Lys(N-tetradecanoyl)
HGEGTFTSDVSSYLEGQAAREFIAWLVRXXG

SEQ ID NO: 65 - protein, 31 aa, Artificial Sequence
  Description of Artificial Sequence: Synthetic modified hGLP-1 peptide
  MOD_RES (29)..(29): Aib
  MOD_RES (30)..(30): Lys(N-tetradecanoyl)
  MOD_RES (31)..(31): Aib
HGEGTFTSDVSSYLEGQAAREFIAWLVRXXX

SEQ ID NO: 66 - protein, 31 aa, Artificial Sequence; identical to SEQ ID NO: 65
  Description of Artificial Sequence: Synthetic modified hGLP-1 peptide
  MOD_RES (29)..(29): Aib
  MOD_RES (30)..(30): Lys(N-tetradecanoyl)
  MOD_RES (31)..(31): D-Ala

SEQ ID NO: 67 - protein, 32 aa, Artificial Sequence
  Description of Artificial Sequence: Synthetic modified hGLP-1 peptide
  MOD_RES (29)..(29): Aib
  MOD_RES (31)..(31): Aib
  MOD_RES (32)..(32): Lys(N-tetradecanoyl)
HGEGTFTSDVSSYLEGQAAREFIAWLVRXRXX

SEQ ID NO: 68 - protein, 32 aa, Artificial Sequence; identical to SEQ ID NO: 67
  Description of Artificial Sequence: Synthetic modified hGLP-1 peptide
  MOD_RES (29)..(29): Aib
  MOD_RES (31)..(31): Beta-Ala
  MOD_RES (32)..(32): Lys(N-tetradecanoyl)

SEQ ID NO: 69 - protein, 32 aa, Artificial Sequence
  Description of Artificial Sequence: Synthetic modified hGLP-1 peptide
  MOD_RES (29)..(29): Aib
  MOD_RES (32)..(32): Lys(N-tetradecanoyl)
HGEGTFTSDVSSYLEGQAAREFIAWLVRXRGX

SEQ ID NO: 70 - protein, 31 aa, Artificial Sequence
  Description of Artificial Sequence: Synthetic modified hGLP-1 peptide
  MOD_RES (30)..(30): Lys(N-tetradecanoyl)
  MOD_RES (31)..(31): Beta-Ala
HGEGTFTSDVSSYLEGQAAREFIAWLVRGXX

SEQ ID NO: 71 - protein, 31 aa, Artificial Sequence; identical to SEQ ID NO: 70
  Description of Artificial Sequence: Synthetic modified hGLP-1 peptide
  MOD_RES (30)..(30): Lys(N-tetradecanoyl)
  MOD_RES (31)..(31): Aib

SEQ ID NO: 72 - protein, 31 aa, Artificial Sequence
  Description of Artificial Sequence: Synthetic modified hGLP-1 peptide
  MOD_RES (29)..(29): Aib
  MOD_RES (31)..(31): Ado
HGEGTFTSDVSSYLEGQAAREFIAWLVRXRX

SEQ ID NO: 73 - protein, 31 aa, Artificial Sequence; identical to SEQ ID NO: 72
  Description of Artificial Sequence: Synthetic modified hGLP-1 peptide
  MOD_RES (29)..(29): Aib
  MOD_RES (31)..(31): Ado

SEQ ID NO: 74 - protein, 31 aa, Artificial Sequence; identical to SEQ ID NO: 70
  Description of Artificial Sequence: Synthetic modified hGLP-1 peptide
  MOD_RES (30)..(30): Lys(N-tetradecanoyl)
  MOD_RES (31)..(31): D-Ala

SEQ ID NO: 75 - protein, 32 aa, Artificial Sequence
  Description of Artificial Sequence: Synthetic modified hGLP-1 peptide
  MOD_RES (31)..(31): Aib
  MOD_RES (32)..(32): Lys(N-tetradecanoyl)
HGEGTFTSDVSSYLEGQAAREFIAWLVRGRXX

SEQ ID NO: 76 - protein, 32 aa, Artificial Sequence; identical to SEQ ID NO: 75
  Description of Artificial Sequence: Synthetic modified hGLP-1 peptide
  MOD_RES (31)..(31): Beta-Ala
  MOD_RES (32)..(32): Lys(N-tetradecanoyl)

SEQ ID NO: 77 - protein, 30 aa, Artificial Sequence
  Description of Artificial Sequence: Synthetic modified hGLP-1 peptide
  MOD_RES (20)..(20): Lys(N-octanoyl)
  MOD_RES (29)..(29): Aib
  c-term amidation
HGEGTFTSDVSSYLEGQAAXEFIAWLVKXR

SEQ ID NO: 78 - protein, 30 aa, Artificial Sequence; identical to SEQ ID NO: 77
  Description of Artificial Sequence: Synthetic modified hGLP-1 peptide
  MOD_RES (20)..(20): Lys(N-tetradecanoyl)
  MOD_RES (29)..(29): Aib
  c-term amidation

SEQ ID NO: 79 - protein, 30 aa, Artificial Sequence; identical to SEQ ID NO: 77
  Description of Artificial Sequence: Synthetic modified hGLP-1 peptide
  MOD_RES (20)..(20): Lys(N-hexadecanoyl)
  MOD_RES (29)..(29): Aib
  c-term amidation

SEQ ID NO: 80 - protein, 30 aa, Artificial Sequence; identical to SEQ ID NO: 77
  Description of Artificial Sequence: Synthetic modified hGLP-1 peptide
  MOD_RES (20)..(20): Lys(N-octanoyl)
  MOD_RES (29)..(29): Beta-Ala
  c-term amidation

SEQ ID NO: 81 - protein, 30 aa, Artificial Sequence; identical to SEQ ID NO: 77
  Description of Artificial Sequence: Synthetic modified hGLP-1 peptide
  MOD_RES (20)..(20): Lys(N-tetradecanoyl)
  MOD_RES (29)..(29): Beta-Ala
  c-term amidation

SEQ ID NO: 82 - protein, 30 aa, Artificial Sequence; identical to SEQ ID NO: 77
  Description of Artificial Sequence: Synthetic modified hGLP-1 peptide
  MOD_RES (20)..(20): Lys(N-hexadecanoyl)
  MOD_RES (29)..(29): Beta-Ala
  c-term amidation

SEQ ID NO: 83 - protein, 30 aa, Artificial Sequence
  Description of Artificial Sequence: Synthetic modified hGLP-1 peptide
  MOD_RES (20)..(20): Lys(N-octanoyl)
  MOD_RES (29)..(29): Aib
  c-term amidation
HGEGTFTSDVSSYLEGQAAXEFIAWLVRXR

SEQ ID NO: 84 - protein, 30 aa, Artificial Sequence; identical to SEQ ID NO: 83
  Description of Artificial Sequence: Synthetic modified hGLP-1 peptide
  MOD_RES (20)..(20): Lys(N-tetradecanoyl)
  MOD_RES (29)..(29): Aib
  c-term amidation

SEQ ID NO: 85 - protein, 30 aa, Artificial Sequence; identical to SEQ ID NO: 83
  Description of Artificial Sequence: Synthetic modified hGLP-1 peptide
  MOD_RES (20)..(20): Lys(N-hexadecanoyl)
  MOD_RES (29)..(29): Aib
  c-term amidation

SEQ ID NO: 86 - protein, 30 aa, Artificial Sequence; identical to SEQ ID NO: 83
  Description of Artificial Sequence: Synthetic modified hGLP-1 peptide
  MOD_RES (20)..(20): Lys(N-decanoyl)
  MOD_RES (29)..(29): Aib
  c-term amidation

SEQ ID NO: 87 - protein, 30 aa, Artificial Sequence
  Description of Artificial Sequence: Synthetic modified hGLP-1 peptide
  MOD_RES (20)..(20): Lys(N-octanoyl)
  MOD_RES (29)..(29): Aib
  c-term amidation
HGEGTFTSDVSSYLEGQAKXEFIAWLVRXR

SEQ ID NO: 88 - protein, 30 aa, Artificial Sequence; identical to SEQ ID NO: 87
  Description of Artificial Sequence: Synthetic modified hGLP-1 peptide
  MOD_RES (20)..(20): Lys(N-tetradecanoyl)
  MOD_RES (29)..(29): Aib
  c-term amidation

SEQ ID NO: 89 - protein, 30 aa, Artificial Sequence; identical to SEQ ID NO: 87
  Description of Artificial Sequence: Synthetic modified hGLP-1 peptide
  MOD_RES (20)..(20): Lys(N-hexadecanoyl)
  MOD_RES (29)..(29): Aib
  c-term amidation

SEQ ID NO: 90 - protein, 30 aa, Artificial Sequence
  Description of Artificial Sequence: Synthetic modified hGLP-1 peptide
  MOD_RES (20)..(20): Lys(N-octanoyl)
  MOD_RES (29)..(29): Aib
  c-term amidation
HGEGTFTSDVSSYLEGQARXEFIAWLVRXR

SEQ ID NO: 91 - protein, 30 aa, Artificial Sequence; identical to SEQ ID NO: 90
  Description of Artificial Sequence: Synthetic modified hGLP-1 peptide
  MOD_RES (20)..(20): Lys(N-tetradecanoyl)
  MOD_RES (29)..(29): Aib
  c-term amidation

SEQ ID NO: 92 - protein, 30 aa, Artificial Sequence; identical to SEQ ID NO: 90
  Description of Artificial Sequence: Synthetic modified hGLP-1 peptide
  MOD_RES (20)..(20): Lys(N-hexadecanoyl)
  MOD_RES (29)..(29): Aib
  c-term amidation

SEQ ID NO: 93 - protein, 30 aa, Artificial Sequence; identical to SEQ ID NO: 90
  Description of Artificial Sequence: Synthetic modified hGLP-1 peptide
  MOD_RES (20)..(20): Lys(N-decanoyl)
  MOD_RES (29)..(29): Aib
  c-term amidation

SEQ ID NO: 94 - protein, 30 aa, Artificial Sequence; identical to SEQ ID NO: 83
  Description of Artificial Sequence: Synthetic modified hGLP-1 peptide
  MOD_RES (20)..(20): Lys(N-octanoyl)
  MOD_RES (29)..(29): Beta-Ala
  c-term amidation

SEQ ID NO: 95 - protein, 30 aa, Artificial Sequence; identical to SEQ ID NO: 83
  Description of Artificial Sequence: Synthetic modified hGLP-1 peptide
  MOD_RES (20)..(20): Lys(N-tetradecanoyl)
  MOD_RES (29)..(29): Beta-Ala
  c-term amidation

SEQ ID NO: 96 - protein, 30 aa, Artificial Sequence; identical to SEQ ID NO: 83
  Description of Artificial Sequence: Synthetic modified hGLP-1 peptide
  MOD_RES (20)..(20): Lys(N-hexadecanoyl)
  MOD_RES (29)..(29): Beta-Ala
  c-term amidation

SEQ ID NO: 97 - protein, 30 aa, Artificial Sequence; identical to SEQ ID NO: 83
  Description of Artificial Sequence: Synthetic modified hGLP-1 peptide
  MOD_RES (20)..(20): Lys(N-decanoyl)
  MOD_RES (29)..(29): Beta-Ala
  c-term amidation

SEQ ID NO: 98 - protein, 30 aa, Artificial Sequence
  Description of Artificial Sequence: Synthetic modified hGLP-1 peptide
  MOD_RES (28)..(28): Lys(N-octanoyl)
  MOD_RES (29)..(29): Aib
  c-term amidation
HGEGTFTSDVSSYLEGQAAKEFIAWLVXXR

SEQ ID NO: 99 - protein, 30 aa, Artificial Sequence; identical to SEQ ID NO: 98
  Description of Artificial Sequence: Synthetic modified hGLP-1 peptide
  MOD_RES (28)..(28): Lys(N-tetradecanoyl)
  MOD_RES (29)..(29): Aib
  c-term amidation

SEQ ID NO: 100 - protein, 30 aa, Artificial Sequence; identical to SEQ ID NO: 98
  Description of Artificial Sequence: Synthetic modified hGLP-1 peptide
  MOD_RES (28)..(28): Lys(N-hexadecanoyl)
  MOD_RES (29)..(29): Aib
  c-term amidation

SEQ ID NO: 101 - protein, 30 aa, Artificial Sequence
  Description of Artificial Sequence: Synthetic modified hGLP-1 peptide
  MOD_RES (28)..(28): Lys(N-octanoyl)
  MOD_RES (29)..(29): Aib
  c-term amidation
HGEGTFTSDVSSYLEGQAAREFIAWLVXXR

SEQ ID NO: 102 - protein, 30 aa, Artificial Sequence; identical to SEQ ID NO: 101
  Description of Artificial Sequence: Synthetic modified hGLP-1 peptide
  MOD_RES (28)..(28): Lys(N-hexadecanoyl)
  MOD_RES (29)..(29): Aib
  c-term amidation

SEQ ID NO: 103 - protein, 30 aa, Artificial Sequence; identical to SEQ ID NO: 101
  Description of Artificial Sequence: Synthetic modified hGLP-1 peptide
  MOD_RES (28)..(28): Lys(N-decanoyl)
  MOD_RES (29)..(29): Aib
  c-term amidation

SEQ ID NO: 104 - protein, 30 aa, Artificial Sequence
  Description of Artificial Sequence: Synthetic modified hGLP-1 peptide
  MOD_RES (28)..(28): Lys(N-octanoyl)
  MOD_RES (29)..(29): Aib
  c-term amidation
HGEGTFTSDVSSYLEGQARREFIAWLVXXR

SEQ ID NO: 105 - protein, 30 aa, Artificial Sequence; identical to SEQ ID NO: 104
  Description of Artificial Sequence: Synthetic modified hGLP-1 peptide
  MOD_RES (28)..(28): Lys(N-tetradecanoyl)
  MOD_RES (29)..(29): Aib
  c-term amidation

SEQ ID NO: 106 - protein, 30 aa, Artificial Sequence; identical to SEQ ID NO: 104
  Description of Artificial Sequence: Synthetic modified hGLP-1 peptide
  MOD_RES (28)..(28): Lys(N-hexadecanoyl)
  MOD_RES (29)..(29): Aib
  c-term amidation

SEQ ID NO: 107 - protein, 30 aa, Artificial Sequence; identical to SEQ ID NO: 104
  Description of Artificial Sequence: Synthetic modified hGLP-1 peptide
  MOD_RES (28)..(28): Lys(N-decanoyl)
  MOD_RES (29)..(29): Aib
  c-term amidation

SEQ ID NO: 108 - protein, 30 aa, Artificial Sequence
  Description of Artificial Sequence: Synthetic modified hGLP-1 peptide
  MOD_RES (28)..(28): Lys(N-octanoyl)
  MOD_RES (29)..(29): Aib
  c-term amidation
HGEGTFTSDVSSYLEGQAKREFIAWLVXXR

SEQ ID NO: 109 - protein, 30 aa, Artificial Sequence; identical to SEQ ID NO: 108
  Description of Artificial Sequence: Synthetic modified hGLP-1 peptide
  MOD_RES (28)..(28): Lys(N-tetradecanoyl)
  MOD_RES (29)..(29): Aib
  c-term amidation

SEQ ID NO: 110 - protein, 30 aa, Artificial Sequence; identical to SEQ ID NO: 108
  Description of Artificial Sequence: Synthetic modified hGLP-1 peptide
  MOD_RES (28)..(28): Lys(N-hexadecanoyl)
  MOD_RES (29)..(29): Aib
  c-term amidation

SEQ ID NO: 111 - protein, 30 aa, Artificial Sequence; identical to SEQ ID NO: 55
  Description of Artificial Sequence: Synthetic modified hGLP-1 peptide
  MOD_RES (29)..(29): Aib
  MOD_RES (30)..(30): Lys(N-octanoyl)
  c-term amidation

SEQ ID NO: 112 - protein, 30 aa, Artificial Sequence; identical to SEQ ID NO: 55
  Description of Artificial Sequence: Synthetic modified hGLP-1 peptide
  MOD_RES (29)..(29): Aib
  MOD_RES (30)..(30): Lys(N-tetradecanoyl)
  c-term amidation

SEQ ID NO: 113 - protein, 30 aa, Artificial Sequence
  Description of Artificial Sequence: Synthetic modified hGLP-1 peptide
  MOD_RES (29)..(29): Aib
  MOD_RES (30)..(30): Lys(N-hexadecanoyl)
  c-term amidation
HGEGTFTSDVSSYLEGQAAREFIAWLVKXX

SEQ ID NO: 114 - protein, 30 aa, Artificial Sequence; identical to SEQ ID NO: 113
  Description of Artificial Sequence: Synthetic modified hGLP-1 peptide
  MOD_RES (29)..(29): Aib
  MOD_RES (30)..(30): Lys(N-octanoyl)
  c-term amidation

SEQ ID NO: 115 - protein, 30 aa, Artificial Sequence; identical to SEQ ID NO: 113
  Description of Artificial Sequence: Synthetic modified hGLP-1 peptide
  MOD_RES (29)..(29): Aib
  MOD_RES (30)..(30): Lys(N-tetradecanoyl)
  c-term amidation

SEQ ID NO: 116 - protein, 30 aa, Artificial Sequence; identical to SEQ ID NO: 113
  Description of Artificial Sequence: Synthetic modified hGLP-1 peptide
  MOD_RES (29)..(29): Aib
  MOD_RES (30)..(30): Lys(N-hexadecanoyl)
  c-term amidation

SEQ ID NO: 117 - protein, 30 aa, Artificial Sequence; identical to SEQ ID NO: 63
  Description of Artificial Sequence: Synthetic modified hGLP-1 peptide
  MOD_RES (29)..(29): Aib
  MOD_RES (30)..(30): Lys(N-octanoyl)
  c-term amidation

SEQ ID NO: 118 - protein, 30 aa, Artificial Sequence; identical to SEQ ID NO: 63
  Description of Artificial Sequence: Synthetic modified hGLP-1 peptide
  MOD_RES (29)..(29): Aib
  MOD_RES (30)..(30): Lys(N-hexadecanoyl)
  c-term amidation

SEQ ID NO: 119 - protein, 32 aa, Artificial Sequence; identical to SEQ ID NO: 69
  Description of Artificial Sequence: Synthetic modified hGLP-1 peptide
  MOD_RES (29)..(29): Aib
  MOD_RES (32)..(32): Lys(N-octanoyl)
  c-term amidation

SEQ ID NO: 120 - protein, 32 aa, Artificial Sequence; identical to SEQ ID NO: 69
  Description of Artificial Sequence: Synthetic modified hGLP-1 peptide
  MOD_RES (29)..(29): Aib
  MOD_RES (32)..(32): Lys(N-decanoyl)
  c-term amidation

SEQ ID NO: 121 - protein, 32 aa, Artificial Sequence; identical to SEQ ID NO: 69
  Description of Artificial Sequence: Synthetic modified hGLP-1 peptide
  MOD_RES (29)..(29): Aib
  MOD_RES (32)..(32): Lys(N-tetradecanoyl)
  c-term amidation

SEQ ID NO: 122 - protein, 32 aa, Artificial Sequence; identical to SEQ ID NO: 69
  Description of Artificial Sequence: Synthetic modified hGLP-1 peptide
  MOD_RES (29)..(29): Aib
  MOD_RES (32)..(32): Lys(N-hexadecanoyl)
  c-term amidation

SEQ ID NO: 123 - protein, 32 aa, Artificial Sequence
  Description of Artificial Sequence: Synthetic modified hGLP-1 peptide
  MOD_RES (29)..(29): Aib
  MOD_RES (31)..(31): Aib
  MOD_RES (32)..(32): Lys(N-octanoyl)
  c-term amidation
HGEGTFTSDVSSYLEGQARREFIAWLVRXRXX

SEQ ID NO: 124 - protein, 32 aa, Artificial Sequence; identical to SEQ ID NO: 123
  Description of Artificial Sequence: Synthetic modified hGLP-1 peptide
  MOD_RES (29)..(29): Aib
  MOD_RES (31)..(31): Aib
  MOD_RES (32)..(32): Lys(N-decanoyl)
  c-term amidation

SEQ ID NO: 125 - protein, 32 aa, Artificial Sequence; identical to SEQ ID NO: 123
  Description of Artificial Sequence: Synthetic modified hGLP-1 peptide
  MOD_RES (29)..(29): Aib
  MOD_RES (31)..(31): Aib
  MOD_RES (32)..(32): Lys(N-tetradecanoyl)
  c-term amidation

SEQ ID NO: 126 - protein, 32 aa, Artificial Sequence; identical to SEQ ID NO: 123
  Description of Artificial Sequence: Synthetic modified hGLP-1 peptide
  MOD_RES (29)..(29): Aib
  MOD_RES (31)..(31): Aib
  MOD_RES (32)..(32): Lys(N-hexadecanoyl)
  c-term amidation

SEQ ID NO: 127 - protein, 32 aa, Artificial Sequence; identical to SEQ ID NO: 67
  Description of Artificial Sequence: Synthetic modified hGLP-1 peptide
  MOD_RES (29)..(29): Aib
  MOD_RES (31)..(31): Aib
  MOD_RES (32)..(32): Lys(N-octanoyl)
  c-term amidation

SEQ ID NO: 128 - protein, 32 aa, Artificial Sequence; identical to SEQ ID NO: 67
  Description of Artificial Sequence: Synthetic modified hGLP-1 peptide
  MOD_RES (29)..(29): Aib
  MOD_RES (31)..(31): Aib
  MOD_RES (32)..(32): Lys(N-decanoyl)
  c-term amidation

SEQ ID NO: 129 - protein, 32 aa, Artificial Sequence; identical to SEQ ID NO: 67
  Description of Artificial Sequence: Synthetic modified hGLP-1 peptide
  MOD_RES (29)..(29): Aib
  MOD_RES (31)..(31): Aib
  MOD_RES (32)..(32): Lys(N-hexadecanoyl)
  c-term amidation

SEQ ID NO: 130 - protein, 30 aa, Artificial Sequence
  Description of Artificial Sequence: Synthetic modified hGLP-1 peptide
  MOD_RES (29)..(29): Aib
  MOD_RES (30)..(30): Lys(N-octanoyl)
  c-term amidation
HGEGTFTSDVSSYLEGQAKREFIAWLVRXX

SEQ ID NO: 131 - protein, 30 aa, Artificial Sequence; identical to SEQ ID NO: 130
  Description of Artificial Sequence: Synthetic modified hGLP-1 peptide
  MOD_RES (29)..(29): Aib
  MOD_RES (30)..(30): Lys(N-tetradecanoyl)
  c-term amidation

SEQ ID NO: 132 - protein, 30 aa, Artificial Sequence; identical to SEQ ID NO: 130
  Description of Artificial Sequence: Synthetic modified hGLP-1 peptide
  MOD_RES (29)..(29): Aib
  MOD_RES (30)..(30): Lys(N-hexadecanoyl)
  c-term amidation

SEQ ID NO: 133 - protein, 30 aa, Artificial Sequence
  Description of Artificial Sequence: Synthetic modified hGLP-1 peptide
  MOD_RES (29)..(29): Aib
  MOD_RES (30)..(30): Lys(N-octanoyl)
  c-term amidation
HGEGTFTSDVSSYLEGQARREFIAWLVRXX

SEQ ID NO: 134 - protein, 30 aa, Artificial Sequence; identical to SEQ ID NO: 133
  Description of Artificial Sequence: Synthetic modified hGLP-1 peptide
  MOD_RES (29)..(29): Aib
  MOD_RES (30)..(30): Lys(N-tetradecanoyl)
  c-term amidation

SEQ ID NO: 135 - protein, 30 aa, Artificial Sequence; identical to SEQ ID NO: 133
  Description of Artificial Sequence: Synthetic modified hGLP-1 peptide
  MOD_RES (29)..(29): Aib
  MOD_RES (30)..(30): Lys(N-hexadecanoyl)
  c-term amidation

SEQ ID NO: 136 - protein, 30 aa, Artificial Sequence; identical to SEQ ID NO: 133
  Description of Artificial Sequence: Synthetic modified hGLP-1 peptide
  MOD_RES (29)..(29): Aib
  MOD_RES (30)..(30): Lys(N-decanoyl)
  c-term amidation

SEQ ID NO: 137 - protein, 30 aa, Artificial Sequence; identical to SEQ ID NO: 98
  Description of Artificial Sequence: Synthetic modified hGLP-1 peptide
  MOD_RES (28)..(28): Lys(N-octanoyl)
  MOD_RES (29)..(29): Beta-Ala
  c-term amidation

SEQ ID NO: 138 - protein, 30 aa, Artificial Sequence; identical to SEQ ID NO: 98
  Description of Artificial Sequence: Synthetic modified hGLP-1 peptide
  MOD_RES (28)..(28): Lys(N-tetradecanoyl)
  MOD_RES (29)..(29): Beta-Ala
  c-term amidation

SEQ ID NO: 139 - protein, 30 aa, Artificial Sequence; identical to SEQ ID NO: 98
  Description of Artificial Sequence: Synthetic modified hGLP-1 peptide
  MOD_RES (28)..(28): Lys(N-hexadecanoyl)
  MOD_RES (29)..(29): Beta-Ala
  c-term amidation

SEQ ID NO: 140 - protein, 30 aa, Artificial Sequence
  Description of Artificial Sequence: Synthetic modified hGLP-1 peptide
  MOD_RES (26)..(26): A6c
  MOD_RES (28)..(28): Lys(N-octanoyl)
  MOD_RES (29)..(29): Beta-Ala
  c-term amidation
HGEGTFTSDVSSYLEGQAAKEFIAWXVXXR

SEQ ID NO: 141 - protein, 30 aa, Artificial Sequence
  Description of Artificial Sequence: Synthetic modified hGLP-1 peptide
  MOD_RES (28)..(28): Lys(N-octanoyl)
  MOD_RES (29)..(29): Beta-Ala
  c-term amidation
HGEGTFTSDVSSYLEGEAAKEFIAWLVXXR

SEQ ID NO: 142 - protein, 30 aa, Artificial Sequence
  Description of Artificial Sequence: Synthetic modified hGLP-1 peptide
  MOD_RES (26)..(26): A6c
  MOD_RES (28)..(28): Lys(N-octanoyl)
  MOD_RES (29)..(29): Beta-Ala
  c-term amidation
HGEGTFTSDVSSYLEGEAAKEFIAWXVXXR

SEQ ID NO: 143 - protein, 30 aa, Artificial Sequence; identical to SEQ ID NO: 101
  Description of Artificial Sequence: Synthetic modified hGLP-1 peptide
  MOD_RES (28)..(28): Lys(N-octanoyl)
  MOD_RES (29)..(29): Beta-Ala
  c-term amidation

SEQ ID NO: 144 - protein, 30 aa, Artificial Sequence; identical to SEQ ID NO: 101
  Description of Artificial Sequence: Synthetic modified hGLP-1 peptide
  MOD_RES (28)..(28): Lys(N-tetradecanoyl)
  MOD_RES (29)..(29): Beta-Ala
  c-term amidation

SEQ ID NO: 145 - protein, 30 aa, Artificial Sequence; identical to SEQ ID NO: 101
  Description of Artificial Sequence: Synthetic modified hGLP-1 peptide
  MOD_RES (28)..(28): Lys(N-hexadecanoyl)
  MOD_RES (29)..(29): Beta-Ala
  c-term amidation

SEQ ID NO: 146 - protein, 30 aa, Artificial Sequence; identical to SEQ ID NO: 101
  Description of Artificial Sequence: Synthetic modified hGLP-1 peptide
  MOD_RES (28)..(28): Lys(N-decanoyl)
  MOD_RES (29)..(29): Beta-Ala
  c-term amidation

SEQ ID NO: 147 - protein, 30 aa, Artificial Sequence; identical to SEQ ID NO: 104
  Description of Artificial Sequence: Synthetic modified hGLP-1 peptide
  MOD_RES (28)..(28): Lys(N-octanoyl)
  MOD_RES (29)..(29): Beta-Ala
  c-term amidation

SEQ ID NO: 148 - protein, 30 aa, Artificial Sequence; identical to SEQ ID NO: 104
  Description of Artificial Sequence: Synthetic modified hGLP-1 peptide
  MOD_RES (28)..(28): Lys(N-tetradecanoyl)
  MOD_RES (29)..(29): Beta-Ala
  c-term amidation

SEQ ID NO: 149 - protein, 30 aa, Artificial Sequence; identical to SEQ ID NO: 104
  Description of Artificial Sequence: Synthetic modified hGLP-1 peptide
  MOD_RES (28)..(28): Lys(N-hexadecanoyl)
  MOD_RES (29)..(29): Beta-Ala
  c-term amidation

SEQ ID NO: 150 - protein, 30 aa, Artificial Sequence; identical to SEQ ID NO: 104
  Description of Artificial Sequence: Synthetic modified hGLP-1 peptide
  MOD_RES (28)..(28): Lys(N-decanoyl)
  MOD_RES (29)..(29): Beta-Ala
  c-term amidation

SEQ ID NO: 151 - protein, 30 aa, Artificial Sequence; identical to SEQ ID NO: 108
  Description of Artificial Sequence: Synthetic modified hGLP-1 peptide
  MOD_RES (28)..(28): Lys(N-octanoyl)
  MOD_RES (29)..(29): Beta-Ala
  c-term amidation

SEQ ID NO: 152 - protein, 30 aa, Artificial Sequence; identical to SEQ ID NO: 108
  Description of Artificial Sequence: Synthetic modified hGLP-1 peptide
  MOD_RES (28)..(28): Lys(N-tetradecanoyl)
  MOD_RES (29)..(29): Beta-Ala
  c-term amidation

SEQ ID NO: 153 - protein, 30 aa, Artificial Sequence; identical to SEQ ID NO: 108
  Description of Artificial Sequence: Synthetic modified hGLP-1 peptide
  MOD_RES (28)..(28): Lys(N-hexadecanoyl)
  MOD_RES (29)..(29): Beta-Ala
  c-term amidation

SEQ ID NO: 154 - protein, 30 aa, Artificial Sequence; identical to SEQ ID NO: 55
  Description of Artificial Sequence: Synthetic modified hGLP-1 peptide
  MOD_RES (29)..(29): Beta-Ala
  MOD_RES (30)..(30): Lys(N-octanoyl)
  c-term amidation

SEQ ID NO: 155 - protein, 30 aa, Artificial Sequence; identical to SEQ ID NO: 55
  Description of Artificial Sequence: Synthetic modified hGLP-1 peptide
  MOD_RES (29)..(29): Beta-Ala
  MOD_RES (30)..(30): Lys(N-tetradecanoyl)
  c-term amidation

SEQ ID NO: 156 - protein, 30 aa, Artificial Sequence; identical to SEQ ID NO: 55
  Description of Artificial Sequence: Synthetic modified hGLP-1 peptide
  MOD_RES (29)..(29): Beta-Ala
  MOD_RES (30)..(30): Lys(N-hexadecanoyl)
  c-term amidation

SEQ ID NO: 157 - protein, 30 aa, Artificial Sequence; identical to SEQ ID NO: 113
  Description of Artificial Sequence: Synthetic modified hGLP-1 peptide
  MOD_RES (29)..(29): Beta-Ala
  MOD_RES (30)..(30): Lys(N-octanoyl)
  c-term amidation

SEQ ID NO: 158 - protein, 30 aa, Artificial Sequence; identical to SEQ ID NO: 113
  Description of Artificial Sequence: Synthetic modified hGLP-1 peptide
  MOD_RES (29)..(29): Beta-Ala
  MOD_RES (30)..(30): Lys(N-tetradecanoyl)
  c-term amidation

SEQ ID NO: 159 - protein, 30 aa, Artificial Sequence; identical to SEQ ID NO: 113
  Description of Artificial Sequence: Synthetic modified hGLP-1 peptide
  MOD_RES (29)..(29): Beta-Ala
  MOD_RES (30)..(30): Lys(N-hexadecanoyl)
  c-term amidation

SEQ ID NO: 160 - protein, 30 aa, Artificial Sequence; identical to SEQ ID NO: 63
  Description of Artificial Sequence: Synthetic modified hGLP-1 peptide
  MOD_RES (29)..(29): Beta-Ala
  MOD_RES (30)..(30): Lys(N-octanoyl)
  c-term amidation

SEQ ID NO: 161 - protein, 30 aa, Artificial Sequence; identical to SEQ ID NO: 63
  Description of Artificial Sequence: Synthetic modified hGLP-1 peptide
  MOD_RES (29)..(29): Beta-Ala
  MOD_RES (30)..(30): Lys(N-tetradecanoyl)
  c-term amidation

SEQ ID NO: 162 - protein, 30 aa, Artificial Sequence; identical to SEQ ID NO: 63
  Description of Artificial Sequence: Synthetic modified hGLP-1 peptide
  MOD_RES (29)..(29): Beta-Ala
  MOD_RES (30)..(30): Lys(N-hexadecanoyl)
  c-term amidation

SEQ ID NO: 163 - protein, 30 aa, Artificial Sequence; identical to SEQ ID NO: 63
  Description of Artificial Sequence: Synthetic modified hGLP-1 peptide
  MOD_RES (29)..(29): Beta-Ala
  MOD_RES (30)..(30): Lys(N-decanoyl)
  c-term amidation

SEQ ID NO: 164 - protein, 30 aa, Artificial Sequence; identical to SEQ ID NO: 130
  Description of Artificial Sequence: Synthetic modified hGLP-1 peptide
  MOD_RES (29)..(29): Beta-Ala
  MOD_RES (30)..(30): Lys(N-octanoyl)
  c-term amidation

SEQ ID NO: 165 - protein, 30 aa, Artificial Sequence; identical to SEQ ID NO: 130
  Description of Artificial Sequence: Synthetic modified hGLP-1 peptide
  MOD_RES (29)..(29): Beta-Ala
  MOD_RES (30)..(30): Lys(N-tetradecanoyl)
  c-term amidation

SEQ ID NO: 166 - protein, 30 aa, Artificial Sequence; identical to SEQ ID NO: 130
  Description of Artificial Sequence: Synthetic modified hGLP-1 peptide
  MOD_RES (29)..(29): Beta-Ala
  MOD_RES (30)..(30): Lys(N-hexadecanoyl)
  c-term amidation

SEQ ID NO: 167 - protein, 30 aa, Artificial Sequence; identical to SEQ ID NO: 133
  Description of Artificial Sequence: Synthetic modified hGLP-1 peptide
  MOD_RES (29)..(29): Beta-Ala
  MOD_RES (30)..(30): Lys(N-octanoyl)
  c-term amidation

SEQ ID NO: 168 - protein, 30 aa, Artificial Sequence; identical to SEQ ID NO: 133
  Description of Artificial Sequence: Synthetic modified hGLP-1 peptide
  MOD_RES (29)..(29): Beta-Ala
  MOD_RES (30)..(30): Lys(N-tetradecanoyl)
  c-term amidation

SEQ ID NO: 169 - protein, 30 aa, Artificial Sequence; identical to SEQ ID NO: 133
  Description of Artificial Sequence: Synthetic modified hGLP-1 peptide
  MOD_RES (29)..(29): Beta-Ala
  MOD_RES (30)..(30): Lys(N-hexadecanoyl)
  c-term amidation

SEQ ID NO: 170 - protein, 30 aa, Artificial Sequence; identical to SEQ ID NO: 133
  Description of Artificial Sequence: Synthetic modified hGLP-1 peptide
  MOD_RES (29)..(29): Beta-Ala
  MOD_RES (30)..(30): Lys(N-decanoyl)
  c-term amidation

SEQ ID NO: 171 - protein, 30 aa, Artificial Sequence
  Description of Artificial Sequence: Synthetic modified hGLP-1 peptide
  MOD_RES (20)..(20): Lys(N-octanoyl)
  MOD_RES (26)..(26): A6c
  MOD_RES (29)..(29): Aib
  c-term amidation
HGEGTFTSDVSSYLEGQAAXEFIAWXVRXR

SEQ ID NO: 172 - protein, 30 aa, Artificial Sequence; identical to SEQ ID NO: 171
  Description of Artificial Sequence: Synthetic modified hGLP-1 peptide
  MOD_RES (20)..(20): Lys(N-tetradecanoyl)
  MOD_RES (26)..(26): A6c
  MOD_RES (29)..(29): Aib
  c-term amidation

SEQ ID NO: 173 - protein, 30 aa, Artificial Sequence; identical to SEQ ID NO: 171
  Description of Artificial Sequence: Synthetic modified hGLP-1 peptide
  MOD_RES (20)..(20): Lys(N-hexadecanoyl)
  MOD_RES (26)..(26): A6c
  MOD_RES (29)..(29): Aib
  c-term amidation

SEQ ID NO: 174 - protein, 30 aa, Artificial Sequence; identical to SEQ ID NO: 140
  Description of Artificial Sequence: Synthetic modified hGLP-1 peptide
  MOD_RES (26)..(26): A6c
  MOD_RES (28)..(28): Lys(N-octanoyl)
  MOD_RES (29)..(29): Aib
  c-term amidation

SEQ ID NO: 175 - protein, 30 aa, Artificial Sequence; identical to SEQ ID NO: 140
  Description of Artificial Sequence: Synthetic modified hGLP-1 peptide
  MOD_RES (26)..(26): A6c
  MOD_RES (28)..(28): Lys(N-tetradecanoyl)
  MOD_RES (29)..(29): Aib
  c-term amidation

SEQ ID NO: 176 - protein, 30 aa, Artificial Sequence; identical to SEQ ID NO: 140
  Description of Artificial Sequence: Synthetic modified hGLP-1 peptide
  MOD_RES (26)..(26): A6c
  MOD_RES (28)..(28): Lys(N-hexadecanoyl)
  MOD_RES (29)..(29): Aib
  c-term amidation

SEQ ID NO: 177 - protein, 30 aa, Artificial Sequence
  Description of Artificial Sequence: Synthetic modified hGLP-1 peptide
  MOD_RES (26)..(26): A6c
  MOD_RES (28)..(28): Lys(N-octanoyl)
  MOD_RES (29)..(29): Aib
  c-term amidation
HGEGTFTSDVSSYLEGQAAREFIAWXVXXR

SEQ ID NO: 178 - protein, 30 aa, Artificial Sequence; identical to SEQ ID NO: 177
  Description of Artificial Sequence: Synthetic modified hGLP-1 peptide
  MOD_RES (26)..(26): A6c
  MOD_RES (28)..(28): Lys(N-tetradecanoyl)
  MOD_RES (29)..(29): Aib
  c-term amidation

SEQ ID NO: 179 - protein, 30 aa, Artificial Sequence
  Description of Artificial Sequence: Synthetic modified hGLP-1 peptide
  MOD_RES (26)..(26): A6c
  MOD_RES (29)..(29): Aib
  MOD_RES (30)..(30): Lys(N-octanoyl)
  c-term amidation
HGEGTFTSDVSSYLEGQAAKEFIAWXVKXX

SEQ ID NO: 180 - protein, 30 aa, Artificial Sequence; identical to SEQ ID NO: 179
  Description of Artificial Sequence: Synthetic modified hGLP-1 peptide
  MOD_RES (26)..(26): A6c
  MOD_RES (29)..(29): Aib
  MOD_RES (30)..(30): Lys(N-tetradecanoyl)
  c-term amidation

SEQ ID NO: 181 - protein, 30 aa, Artificial Sequence; identical to SEQ ID NO: 179
  Description of Artificial Sequence: Synthetic modified hGLP-1 peptide
  MOD_RES (26)..(26): A6c
  MOD_RES (29)..(29): Aib
  MOD_RES (30)..(30): Lys(N-hexadecanoyl)
  c-term amidation

SEQ ID NO: 182 - protein, 30 aa, Artificial Sequence
  Description of Artificial Sequence: Synthetic modified hGLP-1 peptide
  MOD_RES (26)..(26): A6c
  MOD_RES (29)..(29): Aib
  MOD_RES (30)..(30): Lys(N-octanoyl)
  c-term amidation
HGEGTFTSDVSSYLEGQAAREFIAWXVKXX

SEQ ID NO: 183 - protein, 30 aa, Artificial Sequence; identical to SEQ ID NO: 182
  Description of Artificial Sequence: Synthetic modified hGLP-1 peptide
  MOD_RES (26)..(26): A6c
  MOD_RES (29)..(29): Aib
  MOD_RES (30)..(30): Lys(N-tetradecanoyl)
  c-term amidation

SEQ ID NO: 184 - protein, 30 aa, Artificial Sequence; identical to SEQ ID NO: 182
  Description of Artificial Sequence: Synthetic modified hGLP-1 peptide
  MOD_RES (26)..(26): A6c
  MOD_RES (29)..(29): Aib
  MOD_RES (30)..(30): Lys(N-hexadecanoyl)
  c-term amidation

SEQ ID NO: 185 - protein, 30 aa, Artificial Sequence
  Description of Artificial Sequence: Synthetic modified hGLP-1 peptide
  MOD_RES (26)..(26): A6c
  MOD_RES (29)..(29): Aib
  MOD_RES (30)..(30): Lys(N-octanoyl)
  c-term amidation
HGEGTFTSDVSSYLEGQAAREFIAWXVRXX

SEQ ID NO: 186 - protein, 30 aa, Artificial Sequence; identical to SEQ ID NO: 185
  Description of Artificial Sequence: Synthetic modified hGLP-1 peptide
  MOD_RES (26)..(26): A6c
  MOD_RES (29)..(29): Aib
  MOD_RES (30)..(30): Lys(N-decanoyl)
  c-term amidation

SEQ ID NO: 187 - protein, 30 aa, Artificial Sequence; identical to SEQ ID NO: 185
  Description of Artificial Sequence: Synthetic modified hGLP-1 peptide
  MOD_RES (26)..(26): A6c
  MOD_RES (29)..(29): Aib
  MOD_RES (30)..(30): Lys(N-tetradecanoyl)
  c-term amidation

SEQ ID NO: 188 - protein, 30 aa, Artificial Sequence; identical to SEQ ID NO: 185
  Description of Artificial Sequence: Synthetic modified hGLP-1 peptide
  MOD_RES (26)..(26): A6c
  MOD_RES (29)..(29): Aib
  MOD_RES (30)..(30): Lys(N-hexadecanoyl)
  c-term amidation

SEQ ID NO: 189 - protein, 30 aa, Artificial Sequence
  Description of Artificial Sequence: Synthetic modified hGLP-1 peptide
  MOD_RES (18)..(18): Aib
  MOD_RES (20)..(20): Lys(N-octanoyl)
  MOD_RES (29)..(29): Aib
  c-term amidation
HGEGTFTSDVSSYLEGQXAXEFIAWLVRXR

SEQ ID NO: 190 - protein, 30 aa, Artificial Sequence; identical to SEQ ID NO: 189
  Description of Artificial Sequence: Synthetic modified hGLP-1 peptide
  MOD_RES (18)..(18): Aib
  MOD_RES (20)..(20): Lys(N-tetradecanoyl)
  MOD_RES (29)..(29): Aib
  c-term amidation

SEQ ID NO: 191 - protein, 30 aa, Artificial Sequence; identical to SEQ ID NO: 189
  Description of Artificial Sequence: Synthetic modified hGLP-1 peptide
  MOD_RES (18)..(18): Aib
  MOD_RES (20)..(20): Lys(N-hexadecanoyl)
  MOD_RES (29)..(29): Aib
  c-term amidation

SEQ ID NO: 192 - protein, 30 aa, Artificial Sequence
  Description of Artificial Sequence: Synthetic modified hGLP-1 peptide
  MOD_RES (18)..(18): Aib
  MOD_RES (28)..(28): Lys(N-octanoyl)
  MOD_RES (29)..(29): Aib
  c-term amidation
HGEGTFTSDVSSYLEGQXAREFIAWLVXXR

SEQ ID NO: 193 - protein, 30 aa, Artificial Sequence; identical to SEQ ID NO: 192
  Description of Artificial Sequence: Synthetic modified hGLP-1 peptide
  MOD_RES (18)..(18): Aib
  MOD_RES (28)..(28): Lys(N-tetradecanoyl)
  MOD_RES (29)..(29): Aib
  c-term amidation

SEQ ID NO: 194 - protein, 30 aa, Artificial Sequence; identical to SEQ ID NO: 192
  Description of Artificial Sequence: Synthetic modified hGLP-1 peptide
  MOD_RES (18)..(18): Aib
  MOD_RES (28)..(28): Lys(N-hexadecanoyl)
  MOD_RES (29)..(29): Aib
  c-term amidation

SEQ ID NO: 195 - protein, 30 aa, Artificial Sequence
  Description of Artificial Sequence: Synthetic modified hGLP-1 peptide
  MOD_RES (18)..(18): Aib
  MOD_RES (29)..(29): Aib
  MOD_RES (30)..(30): Lys(N-octanoyl)
  c-term amidation
HGEGTFTSDVSSYLEGQXAREFIAWLVRXX

SEQ ID NO: 196 - protein, 30 aa, Artificial Sequence; identical to SEQ ID NO: 195
  Description of Artificial Sequence: Synthetic modified hGLP-1 peptide
  MOD_RES (18)..(18): Aib
  MOD_RES (29)..(29): Aib
  MOD_RES (30)..(30): Lys(N-tetradecanoyl)
  c-term amidation

SEQ ID NO: 197 - protein, 30 aa, Artificial Sequence; identical to SEQ ID NO: 195
  Description of Artificial Sequence: Synthetic modified hGLP-1 peptide
  MOD_RES (18)..(18): Aib
  MOD_RES (29)..(29): Aib
  MOD_RES (30)..(30): Lys(N-hexadecanoyl)
  c-term amidation

SEQ ID NO: 198 - protein, 30 aa, Artificial Sequence; identical to SEQ ID NO: 52
  Description of Artificial Sequence: Synthetic modified hGLP-1 peptide
  MOD_RES (18)..(18): Aib
  MOD_RES (26)..(26): A6c
  MOD_RES (28)..(28): Lys(N-octanoyl)
  MOD_RES (29)..(29): Aib
  c-term amidation

SEQ ID NO: 199 - protein, 30 aa, Artificial Sequence
  Description of Artificial Sequence: Synthetic modified hGLP-1 peptide
  MOD_RES (20)..(20): Lys(N-octanoyl)
  MOD_RES (29)..(29): Aib
  c-term amidation
HGEGTFTSDVSSYLEGEAAXEFIAWLVRXR

SEQ ID NO: 200 - protein, 30 aa, Artificial Sequence; identical to SEQ ID NO: 199
  Description of Artificial Sequence: Synthetic modified hGLP-1 peptide
  MOD_RES (20)..(20): Lys(N-tetradecanoyl)
  MOD_RES (29)..(29): Aib
  c-term amidation

SEQ ID NO: 201 - protein, 30 aa, Artificial Sequence; identical to SEQ ID NO: 199
  Description of Artificial Sequence: Synthetic modified hGLP-1 peptide
  MOD_RES (20)..(20): Lys(N-hexadecanoyl)
  MOD_RES (29)..(29): Aib
  c-term amidation

SEQ ID NO: 202 - protein, 30 aa, Artificial Sequence; identical to SEQ ID NO: 141
  Description of Artificial Sequence: Synthetic modified hGLP-1 peptide
  MOD_RES (28)..(28): Lys(N-octanoyl)
  MOD_RES (29)..(29): Aib
  c-term amidation

SEQ ID NO: 203 - protein, 30 aa, Artificial Sequence; identical to SEQ ID NO: 142
  Description of Artificial Sequence: Synthetic modified hGLP-1 peptide
  MOD_RES (26)..(26): A6c
  MOD_RES (28)..(28): Lys(N-octanoyl)
  MOD_RES (29)..(29): Aib
  c-term amidation

SEQ ID NO: 204 - protein, 30 aa, Artificial Sequence
  Description of Artificial Sequence: Synthetic modified hGLP-1 peptide
  MOD_RES (28)..(28): Lys(N-octanoyl)
  MOD_RES (29)..(29): Aib
  c-term amidation
HGEGTFTSDVSSYLEGEAAREFIAWLVXXR

SEQ ID NO: 205 - protein, 30 aa, Artificial Sequence; identical to SEQ ID NO: 204
  Description of Artificial Sequence: Synthetic modified hGLP-1 peptide
  MOD_RES (28)..(28): Lys(N-tetradecanoyl)
  MOD_RES (29)..(29): Aib
  c-term amidation

SEQ ID NO: 206 - protein, 30 aa, Artificial Sequence; identical to SEQ ID NO: 204
  Description of Artificial Sequence: Synthetic modified hGLP-1 peptide
  MOD_RES (28)..(28): Lys(N-hexadecanoyl)
  MOD_RES (29)..(29): Aib
  c-term amidation

SEQ ID NO: 207 - protein, 30 aa, Artificial Sequence
  Description of Artificial Sequence: Synthetic modified hGLP-1 peptide
  MOD_RES (29)..(29): Aib
  MOD_RES (30)..(30): Lys(N-octanoyl)
  c-term amidation
HGEGTFTSDVSSYLEGEAAKEFIAWLVKXX

SEQ ID NO: 208 - protein, 30 aa, Artificial Sequence; identical to SEQ ID NO: 207
  Description of Artificial Sequence: Synthetic modified hGLP-1 peptide
  MOD_RES (29)..(29): Aib
  MOD_RES (30)..(30): Lys(N-tetradecanoyl)
  c-term amidation

SEQ ID NO: 209 - protein, 30 aa, Artificial Sequence; identical to SEQ ID NO: 207
  Description of Artificial Sequence: Synthetic modified hGLP-1 peptide
  MOD_RES (29)..(29): Aib
  MOD_RES (30)..(30): Lys(N-hexadecanoyl)
  c-term amidation

SEQ ID NO: 210 - protein, 30 aa, Artificial Sequence
  Description of Artificial Sequence: Synthetic modified hGLP-1 peptide
  MOD_RES (29)..(29): Aib
  MOD_RES (30)..(30): Lys(N-octanoyl)
  c-term amidation
HGEGTFTSDVSSYLEGEAAREFIAWLVRXX

SEQ ID NO: 211 - protein, 30 aa, Artificial Sequence; identical to SEQ ID NO: 210
  Description of Artificial Sequence: Synthetic modified hGLP-1 peptide
  MOD_RES (29)..(29): Aib
  MOD_RES (30)..(30): Lys(N-tetradecanoyl)
  c-term amidation

SEQ ID NO: 212 - protein, 30 aa, Artificial Sequence; identical to SEQ ID NO: 210
  Description of Artificial Sequence: Synthetic modified hGLP-1 peptide
  MOD_RES (29)..(29): Aib
  MOD_RES (30)..(30): Lys(N-hexadecanoyl)
  c-term amidation

SEQ ID NO: 213 - protein, 30 aa, Artificial Sequence
  Description of Artificial Sequence: Synthetic modified hGLP-1 peptide
  MOD_RES (20)..(20): Lys(N-octanoyl)
  MOD_RES (24)..(24): Aib
  MOD_RES (29)..(29): Aib
  c-term amidation
HGEGTFTSDVSSYLEGQAAXEFIXWLVRXR

SEQ ID NO: 214 - protein, 30 aa, Artificial Sequence; identical to SEQ ID NO: 213
  Description of Artificial Sequence: Synthetic modified hGLP-1 peptide
  MOD_RES (20)..(20): Lys(N-tetradecanoyl)
  MOD_RES (24)..(24): Aib
  MOD_RES (29)..(29): Aib
  c-term amidation

SEQ ID NO: 215 - protein, 30 aa, Artificial Sequence; identical to SEQ ID NO: 213
  Description of Artificial Sequence: Synthetic modified hGLP-1 peptide
  MOD_RES (20)..(20): Lys(N-hexadecanoyl)
  MOD_RES (24)..(24): Aib
  MOD_RES (29)..(29): Aib
  c-term amidation

SEQ ID NO: 216 - protein, 30 aa, Artificial Sequence
  Description of Artificial Sequence: Synthetic modified hGLP-1 peptide
  MOD_RES (24)..(24): Aib
  MOD_RES (28)..(28): Lys(N-octanoyl)
  MOD_RES (29)..(29): Aib
  c-term amidation
HGEGTFTSDVSSYLEGQAAREFIXWLVXXR

SEQ ID NO: 217 - protein, 30 aa, Artificial Sequence; identical to SEQ ID NO: 216
  Description of Artificial Sequence: Synthetic modified hGLP-1 peptide
  MOD_RES (24)..(24): Aib
  MOD_RES (28)..(28): Lys(N-tetradecanoyl)
  MOD_RES (29)..(29): Aib
  c-term amidation

SEQ ID NO: 218 - protein, 30 aa, Artificial Sequence; identical to SEQ ID NO: 216
  Description of Artificial Sequence: Synthetic modified hGLP-1 peptide
  MOD_RES (24)..(24): Aib
  MOD_RES (28)..(28): Lys(N-hexadecanoyl)
  MOD_RES (29)..(29): Aib
  c-term amidation

SEQ ID NO: 219 - protein, 30 aa, Artificial Sequence
  Description of Artificial Sequence: Synthetic modified hGLP-1 peptide
  MOD_RES (24)..(24): Aib
  MOD_RES (29)..(29): Aib
  MOD_RES (30)..(30): Lys(N-octanoyl)
  c-term amidation
HGEGTFTSDVSSYLEGQAAREFIXWLVRXX

SEQ ID NO: 220 - protein, 30 aa, Artificial Sequence; identical to SEQ ID NO: 219
  Description of Artificial Sequence: Synthetic modified hGLP-1 peptide
  MOD_RES (24)..(24): Aib
  MOD_RES (29)..(29): Aib
  MOD_RES (30)..(30): Lys(N-tetradecanoyl)
  c-term amidation

SEQ ID NO: 221 - protein, 30 aa, Artificial Sequence
  Description of Artificial Sequence: Synthetic modified hGLP-1 peptide
  MOD_RES (24)..(24): Aib
  MOD_RES (29)..(29): Aib
  MOD_RES (30)..(30): Lys(N-hexadecanoyl)
  c-term amidation
HGEGTFTSDVSSYLEGEAAREFIXWLVRXX

SEQ ID NO: 222 - protein, 30 aa, Artificial Sequence
  Description of Artificial Sequence: Synthetic modified hGLP-1 peptide
  MOD_RES (26)..(26): A6c
  MOD_RES (29)..(29): Aib
  MOD_RES (30)..(30): Lys(N-octanoyl)
  c-term amidation
HGEGTFTSDVSSYLEGEAAKEFIAWXVKXX

SEQ ID NO: 223 - protein, 30 aa, Artificial Sequence; identical to SEQ ID NO: 222
  Description of Artificial Sequence: Synthetic modified hGLP-1 peptide
  MOD_RES (26)..(26): A6c
  MOD_RES (29)..(29): Aib
  MOD_RES (30)..(30): Lys(N-tetradecanoyl)
  c-term amidation

SEQ ID NO: 224 - protein, 30 aa, Artificial Sequence; identical to SEQ ID NO: 222
  Description of Artificial Sequence: Synthetic modified hGLP-1 peptide
  MOD_RES (26)..(26): A6c
  MOD_RES (29)..(29): Aib
  MOD_RES (30)..(30): Lys(N-hexadecanoyl)
  c-term amidation

SEQ ID NO: 225 - protein, 30 aa, Artificial Sequence
  Description of Artificial Sequence: Synthetic modified hGLP-1 peptide
  MOD_RES (26)..(26): A6c
  MOD_RES (29)..(29): Aib
  MOD_RES (30)..(30): Lys(N-octanoyl)
  c-term amidation
HGEGTFTSDVSSYLEGEAAREFIAWXVRXX

SEQ ID NO: 226 - protein, 30 aa, Artificial Sequence; identical to SEQ ID NO: 225
  Description of Artificial Sequence: Synthetic modified hGLP-1 peptide
  MOD_RES (26)..(26): A6c
  MOD_RES (29)..(29): Aib
  MOD_RES (30)..(30): Lys(N-tetradecanoyl)
  c-term amidation

SEQ ID NO: 227 - protein, 30 aa, Artificial Sequence; identical to SEQ ID NO: 225
  Description of Artificial Sequence: Synthetic modified hGLP-1 peptide
  MOD_RES (26)..(26): A6c
  MOD_RES (29)..(29): Aib
  MOD_RES (30)..(30): Lys(N-hexadecanoyl)
  c-term amidation

SEQ ID NO: 228 - protein, 30 aa, Artificial Sequence
  Description of Artificial Sequence: Synthetic modified hGLP-1 peptide
  MOD_RES (18)..(18): Aib
  MOD_RES (26)..(26): A6c
  MOD_RES (29)..(29): Aib
  MOD_RES (30)..(30): Lys(N-octanoyl)
  c-term amidation
HGEGTFTSDVSSYLEGEXAREFIAWXVRXX

SEQ ID NO: 229 - protein, 30 aa, Artificial Sequence; identical to SEQ ID NO: 228
  Description of Artificial Sequence: Synthetic modified hGLP-1 peptide
  MOD_RES (18)..(18): Aib
  MOD_RES (26)..(26): A6c
  MOD_RES (29)..(29): Aib
  MOD_RES (30)..(30): Lys(N-tetradecanoyl)
  c-term amidation

SEQ ID NO: 230 - protein, 30 aa, Artificial Sequence; identical to SEQ ID NO: 228
  Description of Artificial Sequence: Synthetic modified hGLP-1 peptide
  MOD_RES (18)..(18): Aib
  MOD_RES (26)..(26): A6c
  MOD_RES (29)..(29): Aib
  MOD_RES (30)..(30): Lys(N-hexadecanoyl)
  c-term amidation

SEQ ID NO: 231 - protein, 30 aa, Artificial Sequence
  Description of Artificial Sequence: Synthetic modified hGLP-1 peptide
  MOD_RES (18)..(18): Aib
  MOD_RES (24)..(24): Aib
  MOD_RES (26)..(26): A6c
  MOD_RES (29)..(29): Aib
  MOD_RES (30)..(30): Lys(N-octanoyl)
  c-term amidation
HGEGTFTSDVSSYLEGEXAREFIXWXVRXX

SEQ ID NO: 232 - protein, 30 aa, Artificial Sequence; identical to SEQ ID NO: 231
  Description of Artificial Sequence: Synthetic modified hGLP-1 peptide
  MOD_RES (18)..(18): Aib
  MOD_RES (24)..(24): Aib
  MOD_RES (26)..(26): A6c
  MOD_RES (29)..(29): Aib
  MOD_RES (30)..(30): Lys(N-tetradecanoyl)
  c-term amidation

SEQ ID NO: 233 - protein, 30 aa, Artificial Sequence; identical to SEQ ID NO: 231
  Description of Artificial Sequence: Synthetic modified hGLP-1 peptide
  MOD_RES (18)..(18): Aib
  MOD_RES (24)..(24): Aib
  MOD_RES (26)..(26): A6c
  MOD_RES (29)..(29): Aib
  MOD_RES (30)..(30): Lys(N-hexadecanoyl)
  c-term amidation

SEQ ID NO: 234 - protein, 30 aa, Artificial Sequence; identical to SEQ ID NO: 1
  Description of Artificial Sequence: Synthetic modified hGLP-1 peptide
  MOD_RES (1)..(1): N-HEPES-His
  MOD_RES (29)..(29): Beta-Ala
  c-term amidation

SEQ ID NO: 235 - protein, 30 aa, Artificial Sequence; identical to SEQ ID NO: 1
  Description of Artificial Sequence: Synthetic modified hGLP-1 peptide
  MOD_RES (1)..(1): N-HEPA-His
  MOD_RES (29)..(29): Beta-Ala
  c-term amidation

SEQ ID NO: 236 - protein, 30 aa, Artificial Sequence; identical to SEQ ID NO: 1
  Description of Artificial Sequence: Synthetic modified hGLP-1 peptide
  MOD_RES (1)..(1): N-tetradecanoyl-His
  MOD_RES (29)..(29): Aib
  c-term amidation

SEQ ID NO: 237 - protein, 30 aa, Artificial Sequence; identical to SEQ ID NO: 1
  Description of Artificial Sequence: Synthetic modified hGLP-1 peptide
  MOD_RES (1)..(1): N-tetradecanoyl-His
  MOD_RES (29)..(29): Beta-Ala
  c-term amidation

SEQ ID NO: 238 - protein, 30 aa, Artificial Sequence; identical to SEQ ID NO: 3
  Description of Artificial Sequence: Synthetic modified hGLP-1 peptide
  MOD_RES (1)..(1): N-tetradecanoyl-His
  MOD_RES (29)..(29): Aib
  c-term amidation

SEQ ID NO: 239 - protein, 30 aa, Artificial Sequence; identical to SEQ ID NO: 3
  Description of Artificial Sequence: Synthetic modified hGLP-1 peptide
  MOD_RES (1)..(1): N-tetradecanoyl-His
  MOD_RES (29)..(29): Beta-Ala
  c-term amidation

SEQ ID NO: 240 - protein, 30 aa, Artificial Sequence
  Description of Artificial Sequence: Synthetic modified hGLP-1 peptide
  MOD_RES (1)..(1): N-tetradecanoyl-His
  MOD_RES (29)..(29): Aib
  c-term amidation
XGEGTFTSDVSSYLEGQARREFIAWLVRXR

SEQ ID NO: 241 - protein, 30 aa, Artificial Sequence; identical to SEQ ID NO: 240
  Description of Artificial Sequence: Synthetic modified hGLP-1 peptide
  MOD_RES (1)..(1): N-tetradecanoyl-His
  MOD_RES (29)..(29): Beta-Ala
  c-term amidation

SEQ ID NO: 242 - protein, 30 aa, Artificial Sequence; identical to SEQ ID NO: 83
  Description of Artificial Sequence: Synthetic modified hGLP-1 peptide
  MOD_RES (20)..(20): Lys(N-octanesulfonyl)
  MOD_RES (29)..(29): Aib
  c-term amidation

SEQ ID NO: 243 - protein, 30 aa, Artificial Sequence; identical to SEQ ID NO: 83
  Description of Artificial Sequence: Synthetic modified hGLP-1 peptide
  MOD_RES (20)..(20): Lys(N-dodecanesulfonyl)
  MOD_RES (29)..(29): Aib
  c-term amidation

SEQ ID NO: 244 - protein, 30 aa, Artificial Sequence; identical to SEQ ID NO: 83
  Description of Artificial Sequence: Synthetic modified hGLP-1 peptide
  MOD_RES (20)..(20): Lys(N-hexadecanesulfonyl)
  MOD_RES (29)..(29): Aib
  c-term amidation

SEQ ID NO: 245 - protein, 30 aa, Artificial Sequence; identical to SEQ ID NO: 101
  Description of Artificial Sequence: Synthetic modified hGLP-1 peptide
  MOD_RES (28)..(28): Lys(N-octanesulfonyl)
  MOD_RES (29)..(29): Aib
  c-term amidation

SEQ ID NO: 246 - protein, 30 aa, Artificial Sequence; identical to SEQ ID NO: 101
  Description of Artificial Sequence: Synthetic modified hGLP-1 peptide
  MOD_RES (28)..(28): Lys(N-dodecanesulfonyl)
  MOD_RES (29)..(29): Aib
  c-term amidation

SEQ ID NO: 247 - protein, 30 aa, Artificial Sequence; identical to SEQ ID NO: 101
  Description of Artificial Sequence: Synthetic modified hGLP-1 peptide
  MOD_RES (28)..(28): Lys(N-hexadecanesulfonyl)
  MOD_RES (29)..(29): Aib
  c-term amidation

SEQ ID NO: 248 - protein, 30 aa, Artificial Sequence; identical to SEQ ID NO: 63
  Description of Artificial Sequence: Synthetic modified hGLP-1 peptide
  MOD_RES (29)..(29): Aib
  MOD_RES (30)..(30): Lys(N-octanesulfonyl)
  c-term amidation

SEQ ID NO: 249 - protein, 30 aa, Artificial Sequence; identical to SEQ ID NO: 63
  Description of Artificial Sequence: Synthetic modified hGLP-1 peptide
  MOD_RES (29)..(29): Aib
  MOD_RES (30)..(30): Lys(N-hexadecanesulfonyl)
  c-term amidation

SEQ ID NO: 250 - protein, 30 aa, Artificial Sequence; identical to SEQ ID NO: 83
  Description of Artificial Sequence: Synthetic modified hGLP-1 peptide
  MOD_RES (20)..(20): Asp(1-(4-decylpiperazine))
  MOD_RES (29)..(29): Aib
  c-term amidation

SEQ ID NO: 251 - protein, 30 aa, Artificial Sequence; identical to SEQ ID NO: 83
  Description of Artificial Sequence: Synthetic modified hGLP-1 peptide
  MOD_RES (20)..(20): Asp(1-(4-dodecylpiperazine))
  MOD_RES (29)..(29): Aib
  c-term amidation

SEQ ID NO: 252 - protein, 30 aa, Artificial Sequence; identical to SEQ ID NO: 83
  Description of Artificial Sequence: Synthetic modified hGLP-1 peptide
  MOD_RES (20)..(20): Asp(1-(4-tetradecylpiperazine))
  MOD_RES (29)..(29): Aib
  c-term amidation

SEQ ID NO: 253 - protein, 30 aa, Artificial Sequence; identical to SEQ ID NO: 83
  Description of Artificial Sequence: Synthetic modified hGLP-1 peptide
  MOD_RES (20)..(20): Asp(1-(4-hexadecylpiperazine))
  MOD_RES (29)..(29): Aib
  c-term amidation

SEQ ID NO: 254 - protein, 30 aa, Artificial Sequence; identical to SEQ ID NO: 101
  Description of Artificial Sequence: Synthetic modified hGLP-1 peptide
  MOD_RES (28)..(28): Asp(1-(4-decylpiperazine))
  MOD_RES (29)..(29): Aib
  c-term amidation

SEQ ID NO: 255 - protein, 30 aa, Artificial Sequence; identical to SEQ ID NO: 101
  Description of Artificial Sequence: Synthetic modified hGLP-1 peptide
  MOD_RES (28)..(28): Asp(1-(4-dodecylpiperazine))
  MOD_RES (29)..(29): Aib
  c-term amidation

SEQ ID NO: 256 - protein, 30 aa, Artificial Sequence; identical to SEQ ID NO: 101
  Description of Artificial Sequence: Synthetic modified hGLP-1 peptide
  MOD_RES (28)..(28): Asp(1-(4-tetradecylpiperazine))
  MOD_RES (29)..(29): Aib
  c-term amidation

SEQ ID NO: 257 - protein, 30 aa, Artificial Sequence; identical to SEQ ID NO: 101
  Description of Artificial Sequence: Synthetic modified hGLP-1 peptide
  MOD_RES (28)..(28): Asp(1-(4-hexadecylpiperazine))
  MOD_RES (29)..(29): Aib
  c-term amidation

SEQ ID NO: 258 - protein, 30 aa, Artificial Sequence; identical to SEQ ID NO: 63
  Description of Artificial Sequence: Synthetic modified hGLP-1 peptide
  MOD_RES (29)..(29): Aib
  MOD_RES (30)..(30): Asp(1-(4-decylpiperazine))
  c-term amidation

SEQ ID NO: 259 - protein, 30 aa, Artificial Sequence; identical to SEQ ID NO: 63
  Description of Artificial Sequence: Synthetic modified hGLP-1 peptide
  MOD_RES (29)..(29): Aib
  MOD_RES (30)..(30): Asp(1-(4-dodecylpiperazine)
  c-term amidation

SEQ ID NO: 260 - protein, 30 aa, Artificial Sequence; identical to SEQ ID NO: 63
  Description of Artificial Sequence: Synthetic modified hGLP-1 peptide
  MOD_RES (29)..(29): Aib
  MOD_RES (30)..(30): Asp(1-(4-hexadecylpiperazine))
  c-term amidation

SEQ ID NO: 261 - protein, 32 aa, Artificial Sequence; identical to SEQ ID NO: 69
  Description of Artificial Sequence: Synthetic modified hGLP-1 peptide
  MOD_RES (29)..(29): Aib
  MOD_RES (32)..(32): Asp(1-(4-decylpiperazine))
  c-term amidation

SEQ ID NO: 262 - protein, 32 aa, Artificial Sequence; identical to SEQ ID NO: 69
  Description of Artificial Sequence: Synthetic modified hGLP-1 peptide
  MOD_RES (29)..(29): Aib
  MOD_RES (32)..(32): Asp(1-(4-dodecylpiperazine))
  c-term amidation

SEQ ID NO: 263 - protein, 32 aa, Artificial Sequence; identical to SEQ ID NO: 69
  Description of Artificial Sequence: Synthetic modified hGLP-1 peptide
  MOD_RES (29)..(29): Aib
  MOD_RES (32)..(32): Asp(1-(4-tetradecylpiperazine))
  c-term amidation

SEQ ID NO: 264 - protein, 32 aa, Artificial Sequence; identical to SEQ ID NO: 69
  Description of Artificial Sequence: Synthetic modified hGLP-1 peptide
  MOD_RES (29)..(29): Aib
  MOD_RES (32)..(32): Asp(1-(4-hexadecylpiperazine))
  c-term amidation

SEQ ID NO: 265 - protein, 32 aa, Artificial Sequence; identical to SEQ ID NO: 67
  Description of Artificial Sequence: Synthetic modified hGLP-1 peptide
  MOD_RES (29)..(29): Aib
  MOD_RES (31)..(31): Aib
  MOD_RES (32)..(32): Asp(1-(4-decylpiperazine))
  c-term amidation

SEQ ID NO: 266 - protein, 32 aa, Artificial Sequence; identical to SEQ ID NO: 67
  Description of Artificial Sequence: Synthetic modified hGLP-1 peptide
  MOD_RES (29)..(29): Aib
  MOD_RES (31)..(31): Aib
  MOD_RES (32)..(32): Asp(1-(4-dodecylpiperazine))
  c-term amidation

SEQ ID NO: 267 - protein, 32 aa, Artificial Sequence; identical to SEQ ID NO: 67
  Description of Artificial Sequence: Synthetic modified hGLP-1 peptide
  MOD_RES (29)..(29): Aib
  MOD_RES (31)..(31): Aib
  MOD_RES (32)..(32): Asp(1-(4-tetradecylpiperazine))
  c-term amidation

SEQ ID NO: 268 - protein, 32 aa, Artificial Sequence; identical to SEQ ID NO: 67
  Description of Artificial Sequence: Synthetic modified hGLP-1 peptide
  MOD_RES (29)..(29): Aib
  MOD_RES (31)..(31): Aib
  MOD_RES (32)..(32): Asp(1-(4-hexadecylpiperazine))
  c-term amidation

SEQ ID NO: 269 - protein, 30 aa, Artificial Sequence; identical to SEQ ID NO: 90
  Description of Artificial Sequence: Synthetic modified hGLP-1 peptide
  MOD_RES (20)..(20): Asp(1-(4-decylpiperazine))
  MOD_RES (29)..(29): Aib
  c-term amidation

SEQ ID NO: 270 - protein, 30 aa, Artificial Sequence; identical to SEQ ID NO: 90
  Description of Artificial Sequence: Synthetic modified hGLP-1 peptide
  MOD_RES (20)..(20): Asp(1-(4-dodecylpiperazine))
  MOD_RES (29)..(29): Aib
  c-term amidation

SEQ ID NO: 271 - protein, 30 aa, Artificial Sequence; identical to SEQ ID NO: 90
  Description of Artificial Sequence: Synthetic modified hGLP-1 peptide
  MOD_RES (20)..(20): Asp(1-(4-tetradecylpiperazine))
  MOD_RES (29)..(29): Aib
  c-term amidation

SEQ ID NO: 272 - protein, 30 aa, Artificial Sequence; identical to SEQ ID NO: 90
  Description of Artificial Sequence: Synthetic modified hGLP-1 peptide
  MOD_RES (20)..(20): Asp(1-(4-hexadecylpiperazine))
  MOD_RES (29)..(29): Aib
  c-term amidation

SEQ ID NO: 273 - protein, 30 aa, Artificial Sequence; identical to SEQ ID NO: 104
  Description of Artificial Sequence: Synthetic modified hGLP-1 peptide
  MOD_RES (28)..(28): Asp(1-(4-decylpiperazine))
  MOD_RES (29)..(29): Aib
  c-term amidation

SEQ ID NO: 274 - protein, 30 aa, Artificial Sequence; identical to SEQ ID NO: 104
  Description of Artificial Sequence: Synthetic modified hGLP-1 peptide
  MOD_RES (28)..(28): Asp(1-(4-dodecylpiperazine)
  MOD_RES (29)..(29): Aib
  c-term amidation

SEQ ID NO: 275 - protein, 30 aa, Artificial Sequence; identical to SEQ ID NO: 104
  Description of Artificial Sequence: Synthetic modified hGLP-1 peptide
  MOD_RES (28)..(28): Asp(1-(4-tetradecylpiperazine))
  MOD_RES (29)..(29): Aib
  c-term amidation

SEQ ID NO: 276 - protein, 30 aa, Artificial Sequence; identical to SEQ ID NO: 104
  Description of Artificial Sequence: Synthetic modified hGLP-1 peptide
  MOD_RES (28)..(28): Asp(1-(4-hexadecylpiperazine))
  MOD_RES (29)..(29): Aib
  c-term amidation

SEQ ID NO: 277 - protein, 30 aa, Artificial Sequence; identical to SEQ ID NO: 133
  Description of Artificial Sequence: Synthetic modified hGLP-1 peptide
  MOD_RES (29)..(29): Aib
  MOD_RES (30)..(30): Asp(1-(4-decylpiperazine))
  c-term amidation

SEQ ID NO: 278 - protein, 30 aa, Artificial Sequence; identical to SEQ ID NO: 133
  Description of Artificial Sequence: Synthetic modified hGLP-1 peptide
  MOD_RES (29)..(29): Aib
  MOD_RES (30)..(30): Asp(1-(4-dodecylpiperazine))
  c-term amidation

SEQ ID NO: 279 - protein, 30 aa, Artificial Sequence; identical to SEQ ID NO: 133
  Description of Artificial Sequence: Synthetic modified hGLP-1 peptide
  MOD_RES (29)..(29): Aib
  MOD_RES (30)..(30): Asp(1-(4-tetradecylpiperazine))
  c-term amidation

SEQ ID NO: 280 - protein, 30 aa, Artificial Sequence; identical to SEQ ID NO: 133
  Description of Artificial Sequence: Synthetic modified hGLP-1 peptide
  MOD_RES (29)..(29): Aib
  MOD_RES (30)..(30): Asp(1-(4-hexadecylpiperazine))
  c-term amidation

SEQ ID NO: 281 - protein, 32 aa, Artificial Sequence
  Description of Artificial Sequence: Synthetic modified hGLP-1 peptide
  MOD_RES (29)..(29): Aib
  MOD_RES (32)..(32): Asp(1-(4-decylpiperazine))
  c-term amidation
HGEGTFTSDVSSYLEGQARREFIAWLVRXRGX

SEQ ID NO: 282 - protein, 32 aa, Artificial Sequence; identical to SEQ ID NO: 281
  Description of Artificial Sequence: Synthetic modified hGLP-1 peptide
  MOD_RES (29)..(29): Aib
  MOD_RES (32)..(32): Asp(1-(4-dodecylpiperazine))
  c-term amidation

SEQ ID NO: 283 - protein, 32 aa, Artificial Sequence; identical to SEQ ID NO: 281
  Description of Artificial Sequence: Synthetic modified hGLP-1 peptide
  MOD_RES (29)..(29): Aib
  MOD_RES (32)..(32): Asp(1-(4-tetradecylpiperazine))
  c-term amidation

SEQ ID NO: 284 - protein, 32 aa, Artificial Sequence; identical to SEQ ID NO: 281
  Description of Artificial Sequence: Synthetic modified hGLP-1 peptide
  MOD_RES (29)..(29): Aib
  MOD_RES (32)..(32): Asp(1-(4-hexadecylpiperazine))
  c-term amidation

SEQ ID NO: 285 - protein, 32 aa, Artificial Sequence; identical to SEQ ID NO: 123
  Description of Artificial Sequence: Synthetic modified hGLP-1 peptide
  MOD_RES (29)..(29): Aib
  MOD_RES (31)..(31): Aib
  MOD_RES (32)..(32): Asp(1-(4-decylpiperazine))
  c-term amidation

SEQ ID NO: 286 - protein, 32 aa, Artificial Sequence; identical to SEQ ID NO: 123
  Description of Artificial Sequence: Synthetic modified hGLP-1 peptide
  MOD_RES (29)..(29): Aib
  MOD_RES (31)..(31): Aib
  MOD_RES (32)..(32): Asp(1-(4-dodecylpiperazine))
  c-term amidation

SEQ ID NO: 287 - protein, 32 aa, Artificial Sequence; identical to SEQ ID NO: 123
  Description of Artificial Sequence: Synthetic modified hGLP-1 peptide
  MOD_RES (29)..(29): Aib
  MOD_RES (31)..(31): Aib
  MOD_RES (32)..(32): Asp(1-(4-tetradecylpiperazine))
  c-term amidation

SEQ ID NO: 288 - protein, 32 aa, Artificial Sequence; identical to SEQ ID NO: 123
  Description of Artificial Sequence: Synthetic modified hGLP-1 peptide
  MOD_RES (29)..(29): Aib
  MOD_RES (31)..(31): Aib
  MOD_RES (32)..(32): Asp(1-(4-hexadecylpiperazine))
  c-term amidation

SEQ ID NO: 289 - protein, 30 aa, Artificial Sequence; identical to SEQ ID NO: 63
  Description of Artificial Sequence: Synthetic modified hGLP-1 peptide
  MOD_RES (29)..(29): Aib
  MOD_RES (30)..(30): Glu(1-dodecylamino)
  c-term amidation

SEQ ID NO: 290 - protein, 30 aa, Artificial Sequence; identical to SEQ ID NO: 83
  Description of Artificial Sequence: Synthetic modified hGLP-1 peptide
  MOD_RES (20)..(20): Glu(1-dodecylamino)
  MOD_RES (29)..(29): Aib
  c-term amidation

SEQ ID NO: 291 - protein, 30 aa, Artificial Sequence; identical to SEQ ID NO: 101
  Description of Artificial Sequence: Synthetic modified hGLP-1 peptide
  MOD_RES (28)..(28): Glu(1-dodecylamino)
  MOD_RES (29)..(29): Aib
  c-term amidation

SEQ ID NO: 292 - protein, 32 aa, Artificial Sequence; identical to SEQ ID NO: 67
  Description of Artificial Sequence: Synthetic modified hGLP-1 peptide
  MOD_RES (29)..(29): Aib
  MOD_RES (31)..(31): Aib
  MOD_RES (32)..(32): Glu(1-dodecylamino)
  c-term amidation

SEQ ID NO: 293 - protein, 30 aa, Artificial Sequence; identical to SEQ ID NO: 83
  Description of Artificial Sequence: Synthetic modified hGLP-1 peptide
  MOD_RES (20)..(20): Lys(N-(2-(4-decyl-1-piperazine)-acetyl))
  MOD_RES (29)..(29): Aib
  c-term amidation

SEQ ID NO: 294 - protein, 30 aa, Artificial Sequence; identical to SEQ ID NO: 83
  Description of Artificial Sequence: Synthetic modified hGLP-1 peptide
  MOD_RES (20)..(20): Lys(N-(2-(4-dodecyl-1-piperazine)-acetyl))
  MOD_RES (29)..(29): Aib
  c-term amidation

SEQ ID NO: 295 - protein, 30 aa, Artificial Sequence; identical to SEQ ID NO: 83
  Description of Artificial Sequence: Synthetic modified hGLP-1 peptide
  MOD_RES (20)..(20): Lys(N-(2-(4-tetradecyl-1-piperazine)-acetyl))
  MOD_RES (29)..(29): Aib
  c-term amidation

SEQ ID NO: 296 - protein, 30 aa, Artificial Sequence; identical to SEQ ID NO: 83
  Description of Artificial Sequence: Synthetic modified hGLP-1 peptide
  MOD_RES (20)..(20): Lys(N-(2-(4-hexadecyl-1-piperazine)-acetyl))
  MOD_RES (29)..(29): Aib
  c-term amidation

SEQ ID NO: 297 - protein, 30 aa, Artificial Sequence; identical to SEQ ID NO: 101
  Description of Artificial Sequence: Synthetic modified hGLP-1 peptide
  MOD_RES (28)..(28): Lys(N-(2-(4-decyl-1-piperazine)-acetyl))
  MOD_RES (29)..(29): Aib
  c-term amidation

SEQ ID NO: 298 - protein, 30 aa, Artificial Sequence; identical to SEQ ID NO: 101
  Description of Artificial Sequence: Synthetic modified hGLP-1 peptide
  MOD_RES (28)..(28): Lys(N-(2-(4-dodecyl-1-piperazine)-acetyl))
  MOD_RES (29)..(29): Aib
  c-term amidation

SEQ ID NO: 299 - protein, 30 aa, Artificial Sequence; identical to SEQ ID NO: 101
  Description of Artificial Sequence: Synthetic modified hGLP-1 peptide
  MOD_RES (28)..(28): Lys(N-(2-(4-tetradecyl-1-piperazine)-acetyl))
  MOD_RES (29)..(29): Aib
  c-term amidation

SEQ ID NO: 300 - protein, 30 aa, Artificial Sequence; identical to SEQ ID NO: 101
  Description of Artificial Sequence: Synthetic modified hGLP-1 peptide
  MOD_RES (28)..(28): Lys(N-(2-(4-hexadecyl-1-piperazine)-acetyl))
  MOD_RES (29)..(29): Aib
  c-term amidation

SEQ ID NO: 301 - protein, 30 aa, Artificial Sequence; identical to SEQ ID NO: 63
  Description of Artificial Sequence: Synthetic modified hGLP-1 peptide
  MOD_RES (29)..(29): Aib
  MOD_RES (30)..(30): Lys(N-(2-(4-decyl-1-piperazine)-acetyl))
  c-term amidation

SEQ ID NO: 302 - protein, 30 aa, Artificial Sequence; identical to SEQ ID NO: 63
  Description of Artificial Sequence: Synthetic modified hGLP-1 peptide
  MOD_RES (29)..(29): Aib
  MOD_RES (30)..(30): Lys(N-(2-(4-dodecyl-1-piperazine)-acetyl))
  c-term amidation

SEQ ID NO: 303 - protein, 30 aa, Artificial Sequence; identical to SEQ ID NO: 63
  Description of Artificial Sequence: Synthetic modified hGLP-1 peptide
  MOD_RES (29)..(29): Aib
  MOD_RES (30)..(30): Lys(N-(2-(4-hexadecyl-1-piperazine)-acetyl))
  c-term amidation

SEQ ID NO: 304 - protein, 32 aa, Artificial Sequence; identical to SEQ ID NO: 69
  Description of Artificial Sequence: Synthetic modified hGLP-1 peptide
  MOD_RES (29)..(29): Aib
  MOD_RES (32)..(32): Lys(N-(2-(4-decyl-1-piperazine)-acetyl))
  c-term amidation

SEQ ID NO: 305 - protein, 32 aa, Artificial Sequence; identical to SEQ ID NO: 69
  Description of Artificial Sequence: Synthetic modified hGLP-1 peptide
  MOD_RES (29)..(29): Aib
  MOD_RES (32)..(32): Lys(N-(2-(4-dodecyl-1-piperazine)-acetyl))
  c-term amidation

SEQ ID NO: 306 - protein, 32 aa, Artificial Sequence; identical to SEQ ID NO: 69
  Description of Artificial Sequence: Synthetic modified hGLP-1 peptide
  MOD_RES (29)..(29): Aib
  MOD_RES (32)..(32): Lys(N-(2-(4-tetradecyl-1-piperazine)-acetyl))
  c-term amidation

SEQ ID NO: 307 - protein, 32 aa, Artificial Sequence; identical to SEQ ID NO: 69
  Description of Artificial Sequence: Synthetic modified hGLP-1 peptide
  MOD_RES (29)..(29): Aib
  MOD_RES (32)..(32): Lys(N-(2-(4-hexadecyl-1-piperazine)-acetyl))
  c-term amidation

SEQ ID NO: 308 - protein, 32 aa, Artificial Sequence; identical to SEQ ID NO: 67
  Description of Artificial Sequence: Synthetic modified hGLP-1 peptide
  MOD_RES (29)..(29): Aib
  MOD_RES (31)..(31): Aib
  MOD_RES (32)..(32): Lys(N-(2-(4-decyl-1-piperazine)-acetyl))
  c-term amidation

SEQ ID NO: 309 - protein, 32 aa, Artificial Sequence; identical to SEQ ID NO: 67
  Description of Artificial Sequence: Synthetic modified hGLP-1 peptide
  MOD_RES (29)..(29): Aib
  MOD_RES (31)..(31): Aib
  MOD_RES (32)..(32): Lys(N-(2-(4-dodecyl-1-piperazine)-acetyl))
  c-term amidation

SEQ ID NO: 310 - protein, 32 aa, Artificial Sequence; identical to SEQ ID NO: 67
  Description of Artificial Sequence: Synthetic modified hGLP-1 peptide
  MOD_RES (29)..(29): Aib
  MOD_RES (31)..(31): Aib
  MOD_RES (32)..(32): Lys(N-(2-(4-tetradecyl-1-piperazine)-acetyl))
  c-term amidation

SEQ ID NO: 311 - protein, 32 aa, Artificial Sequence; identical to SEQ ID NO: 67
  Description of Artificial Sequence: Synthetic modified hGLP-1 peptide
  MOD_RES (29)..(29): Aib
  MOD_RES (31)..(31): Aib
  MOD_RES (32)..(32): Lys(N-(2-(4-hexadecyl-1-piperazine)-acetyl))
  c-term amidation

SEQ ID NO: 312 - protein, 30 aa, Artificial Sequence; identical to SEQ ID NO: 90
  Description of Artificial Sequence: Synthetic modified hGLP-1 peptide
  MOD_RES (20)..(20): Lys(N-(2-(4-decyl-1-piperazine)-acetyl))
  MOD_RES (29)..(29): Aib
  c-term amidation

SEQ ID NO: 313 - protein, 30 aa, Artificial Sequence; identical to SEQ ID NO: 90
  Description of Artificial Sequence: Synthetic modified hGLP-1 peptide
  MOD_RES (20)..(20): Lys(N-(2-(4-dodecyl-1-piperazine)-acetyl))
  MOD_RES (29)..(29): Aib
  c-term amidation

SEQ ID NO: 314 - protein, 30 aa, Artificial Sequence; identical to SEQ ID NO: 90
  Description of Artificial Sequence: Synthetic modified hGLP-1 peptide
  MOD_RES (20)..(20): Lys(N-(2-(4-tetradecyl-1-piperazine)-acetyl))
  MOD_RES (29)..(29): Aib
  c-term amidation

SEQ ID NO: 315 - protein, 30 aa, Artificial Sequence; identical to SEQ ID NO: 90
  Description of Artificial Sequence: Synthetic modified hGLP-1 peptide
  MOD_RES (20)..(20): Lys(N-(2-(4-hexadecyl-1-piperazine)-acetyl))
  MOD_RES (29)..(29): Aib
  c-term amidation

SEQ ID NO: 316 - protein, 30 aa, Artificial Sequence; identical to SEQ ID NO: 104
  Description of Artificial Sequence: Synthetic modified hGLP-1 peptide
  MOD_RES (28)..(28): Lys(N-(2-(4-decyl-1-piperazine)-acetyl))
  MOD_RES (29)..(29): Aib
  c-term amidation

SEQ ID NO: 317 - protein, 30 aa, Artificial Sequence; identical to SEQ ID NO: 104
  Description of Artificial Sequence: Synthetic modified hGLP-1 peptide
  MOD_RES (28)..(28): Lys(N-(2-(4-dodecyl-1-piperazine)-acetyl))
  MOD_RES (29)..(29): Aib
  c-term amidation

SEQ ID NO: 318 - protein, 30 aa, Artificial Sequence; identical to SEQ ID NO: 104
  Description of Artificial Sequence: Synthetic modified hGLP-1 peptide
  MOD_RES (28)..(28): Lys(N-(2-(4-tetradecyl-1-piperazine)-acetyl))
  MOD_RES (29)..(29): Aib
  c-term amidation

SEQ ID NO: 319 - protein, 30 aa, Artificial Sequence; identical to SEQ ID NO: 104
  Description of Artificial Sequence: Synthetic modified hGLP-1 peptide
  MOD_RES (28)..(28): Lys(N-(2-(4-hexadecyl-1-piperazine)-acetyl))
  MOD_RES (29)..(29): Aib
  c-term amidation

SEQ ID NO: 320 - protein, 30 aa, Artificial Sequence; identical to SEQ ID NO: 133
  Description of Artificial Sequence: Synthetic modified hGLP-1 peptide
  MOD_RES (29)..(29): Aib
  MOD_RES (30)..(30): Lys(N-(2-(4-decyl-1-piperazine)-acetyl))
  c-term amidation

SEQ ID NO: 321 - protein, 30 aa, Artificial Sequence; identical to SEQ ID NO: 133
  Description of Artificial Sequence: Synthetic modified hGLP-1 peptide
  MOD_RES (29)..(29): Aib
  MOD_RES (30)..(30): Lys(N-(2-(4-dodecyl-1-piperazine)-acetyl))
  c-term amidation

SEQ ID NO: 322 - protein, 30 aa, Artificial Sequence; identical to SEQ ID NO: 133
  Description of Artificial Sequence: Synthetic modified hGLP-1 peptide
  MOD_RES (29)..(29): Aib
  MOD_RES (30)..(30): Lys(N-(2-(4-tetradecyl-1-piperazine)-acetyl))
  c-term amidation

SEQ ID NO: 323 - protein, 30 aa, Artificial Sequence; identical to SEQ ID NO: 133
  Description of Artificial Sequence: Synthetic modified hGLP-1 peptide
  MOD_RES (29)..(29): Aib
  MOD_RES (30)..(30): Lys(N-(2-(4-hexadecyl-1-piperazine)-acetyl))
  c-term amidation

SEQ ID NO: 324 - protein, 32 aa, Artificial Sequence; identical to SEQ ID NO: 281
  Description of Artificial Sequence: Synthetic modified hGLP-1 peptide
  MOD_RES (29)..(29): Aib
  MOD_RES (32)..(32): Lys(N-(2-(4-decyl-1-piperazine)-acetyl))
  c-term amidation

SEQ ID NO: 325 - protein, 32 aa, Artificial Sequence; identical to SEQ ID NO: 281
  Description of Artificial Sequence: Synthetic modified hGLP-1 peptide
  MOD_RES (29)..(29): Aib
  MOD_RES (32)..(32): Lys(N-(2-(4-dodecyl-1-piperazine)-acetyl))
  c-term amidation

SEQ ID NO: 326 - protein, 32 aa, Artificial Sequence; identical to SEQ ID NO: 281
  Description of Artificial Sequence: Synthetic modified hGLP-1 peptide
  MOD_RES (29)..(29): Aib
  MOD_RES (32)..(32): Lys(N-(2-(4-tetradecyl-1-piperazine)-acetyl))
  c-term amidation

SEQ ID NO: 327 - protein, 32 aa, Artificial Sequence; identical to SEQ ID NO: 281
  Description of Artificial Sequence: Synthetic modified hGLP-1 peptide
  MOD_RES (29)..(29): Aib
  MOD_RES (32)..(32): Lys(N-(2-(4-hexadecyl-1-piperazine)-acetyl))
  c-term amidation

SEQ ID NO: 328 - protein, 32 aa, Artificial Sequence; identical to SEQ ID NO: 123
  Description of Artificial Sequence: Synthetic modified hGLP-1 peptide
  MOD_RES (29)..(29): Aib
  MOD_RES (31)..(31): Aib
  MOD_RES (32)..(32): Lys(N-(2-(4-decyl-1-piperazine)-acetyl))
  c-term amidation

SEQ ID NO: 329 - protein, 32 aa, Artificial Sequence; identical to SEQ ID NO: 123
  Description of Artificial Sequence: Synthetic modified hGLP-1 peptide
  MOD_RES (29)..(29): Aib
  MOD_RES (31)..(31): Aib
  MOD_RES (32)..(32): Lys(N-(2-(4-dodecyl-1-piperazine)-acetyl))
  c-term amidation

SEQ ID NO: 330 - protein, 32 aa, Artificial Sequence; identical to SEQ ID NO: 123
  Description of Artificial Sequence: Synthetic modified hGLP-1 peptide
  MOD_RES (29)..(29): Aib
  MOD_RES (31)..(31): Aib
  MOD_RES (32)..(32): Lys(N-(2-(4-tetradecyl-1-piperazine)-acetyl))
  c-term amidation

SEQ ID NO: 331 - protein, 32 aa, Artificial Sequence; identical to SEQ ID NO: 123
  Description of Artificial Sequence: Synthetic modified hGLP-1 peptide
  MOD_RES (29)..(29): Aib
  MOD_RES (31)..(31): Aib
  MOD_RES (32)..(32): Lys(N-(2-(4-hexadecyl-1-piperazine)-acetyl))
  c-term amidation

SEQ ID NO: 332 - protein, 30 aa, Artificial Sequence; identical to SEQ ID NO: 133
  Description of Artificial Sequence: Synthetic modified hGLP-1 peptide
  MOD_RES (29)..(29): Aib
  MOD_RES (30)..(30): Lys(N-decanoyl)

SEQ ID NO: 333 - protein, 30 aa, Artificial Sequence; identical to SEQ ID NO: 130
  Description of Artificial Sequence: Synthetic modified hGLP-1 peptide
  MOD_RES (29)..(29): Aib
  MOD_RES (30)..(30): Lys(N-decanoyl)

SEQ ID NO: 334 - protein, 32 aa, Artificial Sequence; identical to SEQ ID NO: 67
  Description of Artificial Sequence: Synthetic modified hGLP-1 peptide
  MOD_RES (29)..(29): Aib
  MOD_RES (31)..(31): Ava
  MOD_RES (32)..(32): Ado
  c-term amidation

SEQ ID NO: 335 - protein, 33 aa, Artificial Sequence
  Description of Artificial Sequence: Synthetic modified hGLP-1 peptide
  MOD_RES (29)..(29): Aib
  MOD_RES (32)..(32): Ava
  MOD_RES (33)..(33): Ado
  c-term amidation
HGEGTFTSDVSSYLEGQAAREFIAWLVRXRDXX

SEQ ID NO: 336 - protein, 31 aa, Artificial Sequence; identical to SEQ ID NO: 72
  Description of Artificial Sequence: Synthetic modified hGLP-1 peptide
  MOD_RES (29)..(29): Aib
  MOD_RES (31)..(31): Aun
  c-term amidation

SEQ ID NO: 337 - protein, 30 aa, Artificial Sequence
  Description of Artificial Sequence: Synthetic modified hGLP-1 peptide
  MOD_RES (11)..(11): Aib
  MOD_RES (29)..(29): Aib
  c-term amidation
HGEGTFTSDVXSYLEGQAAKEFIAWLVKXR

SEQ ID NO: 338 - protein, 33 aa, Artificial Sequence
  Description of Artificial Sequence: Synthetic modified hGLP-1 peptide
  MOD_RES (29)..(29): Beta-Ala
  MOD_RES (31)..(31): D-Asp
  MOD_RES (32)..(32): Ava
  MOD_RES (33)..(33): Aun
  c-term amidation
HGEGTFTSDVSSYLEGQAAREFIAWLVRXRXXX

SEQ ID NO: 339 - protein, 30 aa, Artificial Sequence
  Description of Artificial Sequence: Synthetic modified hGLP-1 peptide
  MOD_RES (29)..(29): Beta-Ala
  c-term amidation
HGEGTFTSDVSSYLEEEAAKEFIAWLVKXR

SEQ ID NO: 340 - protein, 30 aa, Artificial Sequence
  Description of Artificial Sequence: Synthetic modified hGLP-1 peptide
  MOD_RES (29)..(29): Beta-Ala
  c-term amidation
HGEGTFTSDVSKYLEGQAAKEFIAWLVKXR

SEQ ID NO: 341 - protein, 30 aa, Artificial Sequence
  Description of Artificial Sequence: Synthetic modified hGLP-1 peptide
  MOD_RES (29)..(29): Beta-Ala
  c-term amidation
HGEGTFTSDVSSYLEGQAAKLFIAWLVKXR

SEQ ID NO: 342 - protein, 30 aa, Artificial Sequence
  Description of Artificial Sequence: Synthetic modified hGLP-1 peptide
  MOD_RES (29)..(29): Beta-Ala
  c-term amidation
HGEGTFTSDVSSYLEGQAAKEFIAWLKKXR

SEQ ID NO: 343 - protein, 30 aa, Artificial Sequence
  Description of Artificial Sequence: Synthetic modified hGLP-1 peptide
  MOD_RES (29)..(29): Beta-Ala
  c-term amidation
HGEGTFTSDVSKYLEGQAAKLFIAWLVKXR

SEQ ID NO: 344 - protein, 30 aa, Artificial Sequence
  Description of Artificial Sequence: Synthetic modified hGLP-1 peptide
  MOD_RES (30)..(30): D-Arg
  c-term amidation
HGEGTFTSDVSSYLEGQAAKEFIAWLVKGX

SEQ ID NO: 345 - protein, 31 aa, Artificial Sequence
  Description of Artificial Sequence: Synthetic modified hGLP-1 peptide
  MOD_RES (29)..(29): Beta-Ala
  MOD_RES (31)..(31): D-Arg
  c-term amidation
HGEGTFTSDVSSYLEGQAAKEFIAWLVKXRX

SEQ ID NO: 346 - protein, 30 aa, Artificial Sequence
  Description of Artificial Sequence: Synthetic modified hGLP-1 peptide
  MOD_RES (21)..(21): Aib
  MOD_RES (29)..(29): Beta-Ala
  c-term amidation
HGEGTFTSDVSSYLEGQAAKXFIAWLVKXR

SEQ ID NO: 347 - protein, 32 aa, Artificial Sequence
  Description of Artificial Sequence: Synthetic modified hGLP-1 peptide
  MOD_RES (21)..(21): Aib
  MOD_RES (29)..(29): Beta-Ala
  MOD_RES (31)..(31): Beta-Ala
  c-term amidation
HGEGTFTSDVSSYLEGQAAKXFIAWLVKXRXR

SEQ ID NO: 348 - protein, 33 aa, Artificial Sequence
  Description of Artificial Sequence: Synthetic modified hGLP-1 peptide
  MOD_RES (21)..(21): Aib
  MOD_RES (29)..(29): Beta-Ala
  MOD_RES (31)..(31): Beta-Ala
  c-term amidation
HGEGTFTSDVSSYLEGQAAKXFIAWLVKXRXRR

SEQ ID NO: 349 - protein, 30 aa, Artificial Sequence
  Description of Artificial Sequence: Synthetic modified hGLP-1 peptide
  MOD_RES (29)..(29): Beta-Ala
  c-term amidation
HGEGTFTSDVSKYLEGQAAKKFIAWLVKXR

SEQ ID NO: 350 - protein, 30 aa, Artificial Sequence
  Description of Artificial Sequence: Synthetic modified hGLP-1 peptide
  MOD_RES (29)..(29): Beta-Ala
  c-term amidation
HGEGTFTSDVSSYLEGQAAKKFIAWLVKXR

SEQ ID NO: 351 - protein, 32 aa, Artificial Sequence
  Description of Artificial Sequence: Synthetic modified hGLP-1 peptide
  MOD_RES (29)..(29): Beta-Ala
  c-term amidation
HGEGTFTSDVSSYLEGQAAKEFIAWLVKXRGR

SEQ ID NO: 352 - protein, 30 aa, Artificial Sequence; identical to SEQ ID NO: 59
  Description of Artificial Sequence: Synthetic modified hGLP-1 peptide
  MOD_RES (29)..(29): Beta-Ala
  c-term amidation

SEQ ID NO: 353 - protein, 30 aa, Artificial Sequence; identical to SEQ ID NO: 5
  Description of Artificial Sequence: Synthetic modified hGLP-1 peptide
  MOD_RES (29)..(29): D-Arg
  c-term amidation

SEQ ID NO: 354 - protein, 31 aa, Artificial Sequence
  Description of Artificial Sequence: Synthetic modified hGLP-1 peptide
  MOD_RES (29)..(29): Beta-Ala
  c-term amidation
HGEGTFTSDVSSYLEGQAAKEFIAWLVKXRR

SEQ ID NO: 355 - protein, 30 aa, Artificial Sequence
  Description of Artificial Sequence: Synthetic modified hGLP-1 peptide
  MOD_RES (29)..(29): Beta-Ala
  c-term amidation
HGEGTFTSDVSSYLEGQAAKEFIAFLVKXR

SEQ ID NO: 356 - protein, 30 aa, Artificial Sequence; identical to SEQ ID NO: 355
  Description of Artificial Sequence: Synthetic modified hGLP-1 peptide
  MOD_RES (29)..(29): Aib
  c-term amidation

SEQ ID NO: 357 - protein, 30 aa, Artificial Sequence
  Description of Artificial Sequence: Synthetic modified hGLP-1 peptide
  MOD_RES (25)..(25): 1-Nal or 2-Nal
  MOD_RES (29)..(29): Aib
  c-term amidation
HGEGTFTSDVSSYLEGQAAKEFIAXLVKXR

SEQ ID NO: 358 - protein, 30 aa, Artificial Sequence
  Description of Artificial Sequence: Synthetic modified hGLP-1 peptide
  MOD_RES (22)..(22): 1-Nal or 2-Nal
  MOD_RES (25)..(25): 1-Nal or 2-Nal
  MOD_RES (29)..(29): Aib
  c-term amidation
HGEGTFTSDVSSYLEGQAAKEXIAXLVKXR

SEQ ID NO: 359 - protein, 30 aa, Artificial Sequence
  Description of Artificial Sequence: Synthetic modified hGLP-1 peptide
  MOD_RES (25)..(25): 1-Nal or 2-Nal
  MOD_RES (29)..(29): Aib
  c-term amidation
HGEGTFTSDVSSYLEGQAAREFIAXLVRXR

SEQ ID NO: 360 - protein, 30 aa, Artificial Sequence
  Description of Artificial Sequence: Synthetic modified hGLP-1 peptide
  MOD_RES (29)..(29): Aib
  c-term amidation
HGEGTFTSDVSSYLEGQAAREFIAFLVRXR

SEQ ID NO: 361 - protein, 30 aa, Artificial Sequence
  Description of Artificial Sequence: Synthetic modified hGLP-1 peptide
  MOD_RES (13)..(13): 1-Nal or 2-Nal
  MOD_RES (25)..(25): 1-Nal or 2-Nal
  MOD_RES (29)..(29): Aib
  c-term amidation
HGEGTFTSDVSSXLEGQAAKEFIAXLVKXR

SEQ ID NO: 362 - protein, 30 aa, Artificial Sequence
  Description of Artificial Sequence: Synthetic modified hGLP-1 peptide
  MOD_RES (6)..(6): 1-Nal or 2-Nal
  MOD_RES (25)..(25): 1-Nal or 2-Nal
  MOD_RES (29)..(29): Aib
  c-term amidation
HGEGTXTSDVSSYLEGQAAKEFIAXLVKXR

SEQ ID NO: 363 - protein, 30 aa, Artificial Sequence; identical to SEQ ID NO: 55
  Description of Artificial Sequence: Synthetic modified hGLP-1 peptide
  MOD_RES (29)..(29): Aib
  MOD_RES (30)..(30): Lys(N-decanoyl)
  c-term amidation

SEQ ID NO: 364 - protein, 30 aa, Artificial Sequence; identical to SEQ ID NO: 83
  Description of Artificial Sequence: Synthetic modified hGLP-1 peptide
  MOD_RES (20)..(20): Lys(N-decanoyl)
  MOD_RES (29)..(29): Aib
  c-term amidation

SEQ ID NO: 365 - protein, 30 aa, Artificial Sequence; identical to SEQ ID NO: 63
  Description of Artificial Sequence: Synthetic modified hGLP-1 peptide
  MOD_RES (29)..(29): Aib
  MOD_RES (30)..(30): Lys(N-dodecanoyl)
  c-term amidation

SEQ ID NO: 366 - protein, 31 aa, Artificial Sequence; identical to SEQ ID NO: 345
  Description of Artificial Sequence: Synthetic modified hGLP-1 peptide
  MOD_RES (29)..(29): Beta-Ala
  MOD_RES (31)..(31): Ser(O-decanoyl)
  c-term amidation

SEQ ID NO: 367 - protein, 33 aa, Artificial Sequence
  Description of Artificial Sequence: Synthetic modified hGLP-1 peptide
  MOD_RES (21)..(21): Aib
  MOD_RES (29)..(29): Beta-Ala
  MOD_RES (31)..(31): Beta-Ala
  MOD_RES (33)..(33): Lys(N-octanoyl)
  c-term amidation
HGEGTFTSDVSSYLEGQAAKXFIAWLVKXRXRX

SEQ ID NO: 368 - protein, 31 aa, Artificial Sequence; identical to SEQ ID NO: 72
  Description of Artificial Sequence: Synthetic modified hGLP-1 peptide
  MOD_RES (29)..(29): Beta-Ala
  MOD_RES (31)..(31): Lys(N-octanoyl)
  c-term amidation

SEQ ID NO: 369 - protein, 31 aa, Artificial Sequence; identical to SEQ ID NO: 72
  Description of Artificial Sequence: Synthetic modified hGLP-1 peptide
  MOD_RES (29)..(29): Beta-Ala
  MOD_RES (31)..(31): Lys(N-decanoyl)
  c-term amidation

SEQ ID NO: 370 - protein, 31 aa, Artificial Sequence; identical to SEQ ID NO: 72
  Description of Artificial Sequence: Synthetic modified hGLP-1 peptide
  MOD_RES (29)..(29): Beta-Ala
  MOD_RES (31)..(31): Lys(N-tetradecanoyl)
  c-term amidation

SEQ ID NO: 371 - protein, 31 aa, Artificial Sequence; identical to SEQ ID NO: 72
  Description of Artificial Sequence: Synthetic modified hGLP-1 peptide
  MOD_RES (29)..(29): Beta-Ala
  MOD_RES (31)..(31): Lys(N-dodecanoyl)
  c-term amidation

SEQ ID NO: 372 - protein, 30 aa, Artificial Sequence
  Description of Artificial Sequence: Synthetic modified hGLP-1 peptide
  MOD_RES (28)..(28): Beta-Ala
  MOD_RES (30)..(30): Lys(N-dodecanoyl)
  c-term amidation
GEGTFTSDVSSYLEGQAAREFIAWLVRXRX

SEQ ID NO: 373 - protein, 30 aa, Artificial Sequence
  Description of Artificial Sequence: Synthetic modified hGLP-1 peptide
  MOD_RES (29)..(29): Aib
  c-term amidation
HGEGTFTSDVSSYLEGQAAREFIAWLVKXR

SEQ ID NO: 374 - protein, 30 aa, Artificial Sequence
  Description of Artificial Sequence: Synthetic modified hGLP-1 peptide
  MOD_RES (29)..(29): Aib
  c-term amidation
HGEGTFTSDVSSYLEGQAAREFIAFLVKXR

SEQ ID NO: 375 - protein, 30 aa, Artificial Sequence; identical to SEQ ID NO: 374
  Description of Artificial Sequence: Synthetic modified hGLP-1 peptide
  MOD_RES (29)..(29): Beta-Ala
  c-term amidation

SEQ ID NO: 376 - protein, 30 aa, Artificial Sequence; identical to SEQ ID NO: 373
  Description of Artificial Sequence: Synthetic modified hGLP-1 peptide
  MOD_RES (29)..(29): Beta-Ala
  c-term amidation

SEQ ID NO: 377 - protein, 30 aa, Artificial Sequence; identical to SEQ ID NO: 360
  Description of Artificial Sequence: Synthetic modified hGLP-1 peptide
  MOD_RES (29)..(29): Aib
  c-term amidation

SEQ ID NO: 378 - protein, 30 aa, Artificial Sequence; identical to SEQ ID NO: 360
  Description of Artificial Sequence: Synthetic modified hGLP-1 peptide
  MOD_RES (29)..(29): Beta-Ala
  c-term amidation

SEQ ID NO: 379 - protein, 30 aa, Artificial Sequence
  Description of Artificial Sequence: Synthetic modified hGLP-1 peptide
  MOD_RES (29)..(29): Aib
  c-term amidation
HGEGTFTSDVSSYLEGQAAKEFIAWLVRXR

SEQ ID NO: 380 - protein, 30 aa, Artificial Sequence; identical to SEQ ID NO: 379
  Description of Artificial Sequence: Synthetic modified hGLP-1 peptide
  MOD_RES (29)..(29): Beta-Ala
  c-term amidation

SEQ ID NO: 381 - protein, 30 aa, Artificial Sequence
  Description of Artificial Sequence: Synthetic modified hGLP-1 peptide
  MOD_RES (29)..(29): Aib
  c-term amidation
HGEGTFTSDVSSYLEGQAAKEFIAFLVRXR

SEQ ID NO: 382 - protein, 30 aa, Artificial Sequence; identical to SEQ ID NO: 381
  Description of Artificial Sequence: Synthetic modified hGLP-1 peptide
  MOD_RES (29)..(29): Beta-Ala
  c-term amidation

SEQ ID NO: 383 - protein, 30 aa, Artificial Sequence; identical to SEQ ID NO: 63
  Description of Artificial Sequence: Synthetic modified hGLP-1 peptide
  MOD_RES (29)..(29): Beta-Ala
  MOD_RES (30)..(30): Lys(N-Aec-decanoyl)
  c-term amidation

SEQ ID NO: 384 - protein, 31 aa, Artificial Sequence; identical to SEQ ID NO: 345
  Description of Artificial Sequence: Synthetic modified hGLP-1 peptide
  MOD_RES (29)..(29): Beta-Ala
  MOD_RES (31)..(31): Ser(O-decanoyl)
  c-term amidation

SEQ ID NO: 385 - protein, 30 aa, Artificial Sequence
  Description of Artificial Sequence: Synthetic modified hGLP-1 peptide
  MOD_RES (1)..(1): N-Me-His
  MOD_RES (29)..(29): Aib
  c-term amidation
XSEGTFTSDVSSYLEGQAAKEFIAWLVKXR

SEQ ID NO: 386 - protein, 30 aa, Artificial Sequence; identical to SEQ ID NO: 385
  Description of Artificial Sequence: Synthetic modified hGLP-1 peptide
  MOD_RES (1)..(1): N-Me-His
  MOD_RES (29)..(29): Beta-Ala
  c-term amidation

SEQ ID NO: 387 - protein, 30 aa, Artificial Sequence
  Description of Artificial Sequence: Synthetic modified hGLP-1 peptide
  MOD_RES (1)..(1): N-Me-His
  MOD_RES (29)..(29): Aib
  c-term amidation
XSEGTFTSDVSSYLEGQAAREFIAWLVRXR

SEQ ID NO: 388 - protein, 30 aa, Artificial Sequence; identical to SEQ ID NO: 387
  Description of Artificial Sequence: Synthetic modified hGLP-1 peptide
  MOD_RES (1)..(1): N-Me-His
  MOD_RES (29)..(29): Beta-Ala
  c-term amidation

SEQ ID NO: 389 - protein, 30 aa, Artificial Sequence
  Description of Artificial Sequence: Synthetic modified hGLP-1 peptide
  MOD_RES (29)..(29): A6c
  c-term amidation
HSEGTFTSDVSSYLEGQAAKEFIAWLVKXR

SEQ ID NO: 390 - protein, 30 aa, Artificial Sequence; identical to SEQ ID NO: 389
  Description of Artificial Sequence: Synthetic modified hGLP-1 peptide
  MOD_RES (29)..(29): A5c
  c-term amidation

SEQ ID NO: 391 - protein, 30 aa, Artificial Sequence; identical to SEQ ID NO: 389
  Description of Artificial Sequence: Synthetic modified hGLP-1 peptide
  MOD_RES (29)..(29): D-Ala
  c-term amidation

SEQ ID NO: 392 - protein, 30 aa, Artificial Sequence
  Description of Artificial Sequence: Synthetic modified hGLP-1 peptide
  MOD_RES (26)..(26): A6c
  MOD_RES (29)..(29): Aib
  c-term amidation
HSEGTFTSDVSSYLEGQAAKEFIAWXVKXR

SEQ ID NO: 393 - protein, 30 aa, Artificial Sequence; identical to SEQ ID NO: 392
  Description of Artificial Sequence: Synthetic modified hGLP-1 peptide
  MOD_RES (26)..(26): A5c
  MOD_RES (29)..(29): Aib
  c-term amidation

SEQ ID NO: 394 - protein, 30 aa, Artificial Sequence
  Description of Artificial Sequence: Synthetic modified hGLP-1 peptide
  MOD_RES (29)..(29): Aib
  c-term amidation
HSEGTFTSDVSSYLEGEAAKEFIAWLVKXR

SEQ ID NO: 395 - protein, 30 aa, Artificial Sequence
  Description of Artificial Sequence: Synthetic modified hGLP-1 peptide
  MOD_RES (18)..(18): Aib
  MOD_RES (29)..(29): Aib
  c-term amidation
HSEGTFTSDVSSYLEGQXAKEFIAWLVKXR

SEQ ID NO: 396 - protein, 30 aa, Artificial Sequence
  Description of Artificial Sequence: Synthetic modified hGLP-1 peptide
  MOD_RES (24)..(24): Aib
  MOD_RES (29)..(29): Aib
  c-term amidation
HSEGTFTSDVSSYLEGQAAKEFIXWLVKXR

SEQ ID NO: 397 - protein, 30 aa, Artificial Sequence
  Description of Artificial Sequence: Synthetic modified hGLP-1 peptide
  MOD_RES (19)..(19): Aib
  MOD_RES (29)..(29): Aib
  c-term amidation
HSEGTFTSDVSSYLEGQAXKEFIAWLVKXR

SEQ ID NO: 398 - protein, 30 aa, Artificial Sequence
  Description of Artificial Sequence: Synthetic modified hGLP-1 peptide
  MOD_RES (10)..(10): A6c
  MOD_RES (14)..(14): A6c
  MOD_RES (29)..(29): Aib
  c-term amidation
HSEGTFTSDXSSYXEGQAAKEFIAWLVKXR

SEQ ID NO: 399 - protein, 30 aa, Artificial Sequence
  Description of Artificial Sequence: Synthetic modified hGLP-1 peptide
  MOD_RES (10)..(10): A6c
  MOD_RES (23)..(23): A6c
  MOD_RES (26)..(26): Ac6
  MOD_RES (29)..(29): Aib
  c-term amidation
HSEGTFTSDXSSYLEGQAAKEFXAWXVKXR

SEQ ID NO: 400 - protein, 30 aa, Artificial Sequence
  Description of Artificial Sequence: Synthetic modified hGLP-1 peptide
  MOD_RES (14)..(14): A6c
  MOD_RES (26)..(26): A6c
  MOD_RES (29)..(29): Aib
  c-term amidation
HSEGTFTSDVSSYXEGQAAKEFIAWXVKXR

SEQ ID NO: 401 - protein, 30 aa, Artificial Sequence
  Description of Artificial Sequence: Synthetic modified hGLP-1 peptide
  MOD_RES (14)..(14): A6c
  MOD_RES (29)..(29): Aib
  c-term amidation
HSEGTFTSDVSSYXEGQAAKEFIAWLVKXR

SEQ ID NO: 402 - protein, 30 aa, Artificial Sequence
  Description of Artificial Sequence: Synthetic modified hGLP-1 peptide
  MOD_RES (29)..(29): Aib
  c-term amidation
HSEGTFTSDVSSYLEGQAKKEFIAWLVKXR

SEQ ID NO: 403 - protein, 30 aa, Artificial Sequence
  Description of Artificial Sequence: Synthetic modified hGLP-1 peptide
  MOD_RES (14)..(14): A6c
  MOD_RES (18)..(18): Aib
  MOD_RES (29)..(29): Aib
  c-term amidation
HSEGTFTSDVSSYXEGQXAKEFIAWLVKXR

SEQ ID NO: 404 - protein, 30 aa, Artificial Sequence
  Description of Artificial Sequence: Synthetic modified hGLP-1 peptide
  MOD_RES (23)..(23): A6c
  MOD_RES (26)..(26): A6c
  MOD_RES (29)..(29): Aib
  c-term amidation
HSEGTFTSDVSSYLEGQAAKEFXAWXVKXR

SEQ ID NO: 405 - protein, 30 aa, Artificial Sequence
  Description of Artificial Sequence: Synthetic modified hGLP-1 peptide
  MOD_RES (18)..(18): Aib
  MOD_RES (23)..(23): A6c
  MOD_RES (26)..(26): A6c
  MOD_RES (29)..(29): Aib
  c-term amidation
HSEGTFTSDVSSYLEGQXAKEFXAWXVKXR

SEQ ID NO: 406 - protein, 30 aa, Artificial Sequence
  Description of Artificial Sequence: Synthetic modified hGLP-1 peptide
  MOD_RES (6)..(6): A6c
  MOD_RES (29)..(29): Aib
  c-term amidation
HSEGTXTSDVSSYLEGQAAKEFIAWLVKXR

SEQ ID NO: 407 - protein, 30 aa, Artificial Sequence; identical to SEQ ID NO: 401
  Description of Artificial Sequence: Synthetic modified hGLP-1 peptide
  MOD_RES (14)..(14): Cha
  MOD_RES (29)..(29): Aib
  c-term amidation

SEQ ID NO: 408 - protein, 30 aa, Artificial Sequence
  Description of Artificial Sequence: Synthetic modified hGLP-1 peptide
  MOD_RES (27)..(27): A6c
  MOD_RES (29)..(29): Aib
  c-term amidation
HSEGTFTSDVSSYLEGQAAKEFIAWLXKXR

SEQ ID NO: 409 - protein, 30 aa, Artificial Sequence; identical to SEQ ID NO: 398
  Description of Artificial Sequence: Synthetic modified hGLP-1 peptide
  MOD_RES (10)..(10): A6c
  MOD_RES (14)..(14): A6c
  MOD_RES (29)..(29): Beta-Ala
  c-term amidation

SEQ ID NO: 410 - protein, 30 aa, Artificial Sequence
  Description of Artificial Sequence: Synthetic modified hGLP-1 peptide
  MOD_RES (16)..(16): Beta-Ala
  MOD_RES (29)..(29): Aib
  c-term amidation
HSEGTFTSDVSSYLEXQAAKEFIAWLVKXR

SEQ ID NO: 411 - protein, 30 aa, Artificial Sequence; identical to SEQ ID NO: 410
  Description of Artificial Sequence: Synthetic modified hGLP-1 peptide
  MOD_RES (16)..(16): Aib
  MOD_RES (29)..(29): Aib
  c-term amidation

SEQ ID NO: 412 - protein, 30 aa, Artificial Sequence
  Description of Artificial Sequence: Synthetic modified hGLP-1 peptide
  MOD_RES (26)..(26): A6c
  MOD_RES (29)..(29): Aib
  c-term amidation
HSEGTFTSDVSSYLEGEAAKEFIAWXVKXR

SEQ ID NO: 413 - protein, 30 aa, Artificial Sequence
  Description of Artificial Sequence: Synthetic modified hGLP-1 peptide
  MOD_RES (18)..(18): Aib
  MOD_RES (26)..(26): A6c
  MOD_RES (29)..(29): Aib
  c-term amidation
HSEGTFTSDVSSYLEGEXAKEFIAWXVKXR

SEQ ID NO: 414 - protein, 30 aa, Artificial Sequence
  Description of Artificial Sequence: Synthetic modified hGLP-1 peptide
  MOD_RES (18)..(19): Aib
  MOD_RES (26)..(26): A6c
  MOD_RES (29)..(29): Aib
  c-term amidation
HSEGTFTSDVSSYLEGEXXKEFIAWXVKXR

SEQ ID NO: 415 - protein, 30 aa, Artificial Sequence
  Description of Artificial Sequence: Synthetic modified hGLP-1 peptide
  MOD_RES (10)..(10): A6c
  MOD_RES (14)..(14): A6c
  MOD_RES (18)..(19): Aib
  MOD_RES (26)..(26): A6c
  MOD_RES (29)..(29): Aib
  c-term amidation
HSEGTFTSDXSSYXEGEXXKEFIAWXVKXR

SEQ ID NO: 416 - protein, 30 aa, Artificial Sequence; identical to SEQ ID NO: 392
  Description of Artificial Sequence: Synthetic modified hGLP-1 peptide
  MOD_RES (26)..(26): A6c
  MOD_RES (29)..(29): Beta-Ala
  c-term amidation

SEQ ID NO: 417 - protein, 30 aa, Artificial Sequence; identical to SEQ ID NO: 392
  Description of Artificial Sequence: Synthetic modified hGLP-1 peptide
  MOD_RES (26)..(26): A5c
  MOD_RES (29)..(29): Beta-Ala
  c-term amidation

SEQ ID NO: 418 - protein, 30 aa, Artificial Sequence; identical to SEQ ID NO: 394
  Description of Artificial Sequence: Synthetic modified hGLP-1 peptide
  MOD_RES (29)..(29): Beta-Ala
  c-term amidation

SEQ ID NO: 419 - protein, 30 aa, Artificial Sequence; identical to SEQ ID NO: 395
  Description of Artificial Sequence: Synthetic modified hGLP-1 peptide
  MOD_RES (18)..(18): Aib
  MOD_RES (29)..(29): Beta-Ala
  c-term amidation

SEQ ID NO: 420 - protein, 30 aa, Artificial Sequence; identical to SEQ ID NO: 396
  Description of Artificial Sequence: Synthetic modified hGLP-1 peptide
  MOD_RES (24)..(24): Aib
  MOD_RES (29)..(29): Beta-Ala
  c-term amidation

SEQ ID NO: 421 - protein, 30 aa, Artificial Sequence; identical to SEQ ID NO: 397
  Description of Artificial Sequence: Synthetic modified hGLP-1 peptide
  MOD_RES (19)..(19): Aib
  MOD_RES (29)..(29): Beta-Ala
  c-term amidation

SEQ ID NO: 422 - protein, 30 aa, Artificial Sequence; identical to SEQ ID NO: 399
  Description of Artificial Sequence: Synthetic modified hGLP-1 peptide
  MOD_RES (10)..(10): A6c
  MOD_RES (23)..(23): A6c
  MOD_RES (26)..(26): A6c
  MOD_RES (29)..(29): Beta-Ala
  c-term amidation

SEQ ID NO: 423 - protein, 30 aa, Artificial Sequence; identical to SEQ ID NO: 400
  Description of Artificial Sequence: Synthetic modified hGLP-1 peptide
  MOD_RES (14)..(14): A6c
  MOD_RES (26)..(26): A6c
  MOD_RES (29)..(29): Beta-Ala
  c-term amidation

SEQ ID NO: 424 - protein, 30 aa, Artificial Sequence; identical to SEQ ID NO: 401
  Description of Artificial Sequence: Synthetic modified hGLP-1 peptide
  MOD_RES (14)..(14): A6c
  MOD_RES (29)..(29): Beta-Ala
  c-term amidation

SEQ ID NO: 425 - protein, 30 aa, Artificial Sequence; identical to SEQ ID NO: 402
  Description of Artificial Sequence: Synthetic modified hGLP-1 peptide
  MOD_RES (29)..(29): Beta-Ala
  c-term amidation

SEQ ID NO: 426 - protein, 30 aa, Artificial Sequence; identical to SEQ ID NO: 403
  Description of Artificial Sequence: Synthetic modified hGLP-1 peptide
  MOD_RES (14)..(14): A6c
  MOD_RES (18)..(18): Aib
  MOD_RES (29)..(29): Beta-Ala
  c-term amidation

SEQ ID NO: 427 - protein, 30 aa, Artificial Sequence; identical to SEQ ID NO: 404
  Description of Artificial Sequence: Synthetic modified hGLP-1 peptide
  MOD_RES (23)..(23): A6c
  MOD_RES (26)..(26): A6c
  MOD_RES (29)..(29): Beta-Ala
  c-term amidation

SEQ ID NO: 428 - protein, 30 aa, Artificial Sequence; identical to SEQ ID NO: 405
  Description of Artificial Sequence: Synthetic modified hGLP-1 peptide
  MOD_RES (18)..(18): Aib
  MOD_RES (23)..(23): A6c
  MOD_RES (26)..(26): A6c
  MOD_RES (29)..(29): Beta-Ala
  c-term amidation

SEQ ID NO: 429 - protein, 30 aa, Artificial Sequence; identical to SEQ ID NO: 406
  Description of Artificial Sequence: Synthetic modified hGLP-1 peptide
  MOD_RES (6)..(6): A6c
  MOD_RES (29)..(29): Beta-Ala
  c-term amidation

SEQ ID NO: 430 - protein, 30 aa, Artificial Sequence; identical to SEQ ID NO: 401
  Description of Artificial Sequence: Synthetic modified hGLP-1 peptide
  MOD_RES (14)..(14): Cha
  MOD_RES (29)..(29): Beta-Ala
  c-term amidation

SEQ ID NO: 431 - protein, 30 aa, Artificial Sequence; identical to SEQ ID NO: 408
  Description of Artificial Sequence: Synthetic modified hGLP-1 peptide
  MOD_RES (27)..(27): A6c
  MOD_RES (29)..(29): Beta-Ala
  c-term amidation

SEQ ID NO: 432 - protein, 30 aa, Artificial Sequence; identical to SEQ ID NO: 410
  Description of Artificial Sequence: Synthetic modified hGLP-1 peptide
  MOD_RES (16)..(16): Beta-Ala
  MOD_RES (29)..(29): Beta-Ala
  c-term amidation

SEQ ID NO: 433 - protein, 30 aa, Artificial Sequence; identical to SEQ ID NO: 410
  Description of Artificial Sequence: Synthetic modified hGLP-1 peptide
  MOD_RES (16)..(16): Aib
  MOD_RES (29)..(29): Beta-Ala
  c-term amidation

SEQ ID NO: 434 - protein, 30 aa, Artificial Sequence; identical to SEQ ID NO: 412
  Description of Artificial Sequence: Synthetic modified hGLP-1 peptide
  MOD_RES (26)..(26): A6c
  MOD_RES (29)..(29): Beta-Ala
  c-term amidation

SEQ ID NO: 435 - protein, 30 aa, Artificial Sequence; identical to SEQ ID NO: 413
  Description of Artificial Sequence: Synthetic modified hGLP-1 peptide
  MOD_RES (18)..(18): Aib
  MOD_RES (26)..(26): A6c
  MOD_RES (29)..(29): Beta-Ala
  c-term amidation

SEQ ID NO: 436 - protein, 30 aa, Artificial Sequence
  Description of Artificial Sequence: Synthetic modified hGLP-1 peptide
  MOD_RES (18)..(18): Aib
  MOD_RES (26)..(26): A6c
  MOD_RES (28)..(28): Lys(N-octanoyl)
  MOD_RES (29)..(29): Beta-Ala
  c-term amidation
HSEGTFTSDVSSYLEGEXAKEFIAWXVXXR

SEQ ID NO: 437 - protein, 30 aa, Artificial Sequence; identical to SEQ ID NO: 414
  Description of Artificial Sequence: Synthetic modified hGLP-1 peptide
  MOD_RES (18)..(19): Aib
  MOD_RES (26)..(26): A6c
  MOD_RES (29)..(29): Beta-Ala
  c-term amidation

SEQ ID NO: 438 - protein, 30 aa, Artificial Sequence; identical to SEQ ID NO: 415
  Description of Artificial Sequence: Synthetic modified hGLP-1 peptide
  MOD_RES (10)..(10): A6c
  MOD_RES (14)..(14): A6c
  MOD_RES (18)..(19): Aib
  MOD_RES (26)..(26): A6c
  MOD_RES (29)..(29): Beta-Ala
  c-term amidation

SEQ ID NO: 439 - protein, 30 aa, Artificial Sequence
  Description of Artificial Sequence: Synthetic modified hGLP-1 peptide
  MOD_RES (29)..(29): Aib
  MOD_RES (30)..(30): D-Arg
  c-term amidation
HSEGTFTSDVSSYLEGQAAKEFIAWLVKXX

SEQ ID NO: 440 - protein, 30 aa, Artificial Sequence; identical to SEQ ID NO: 439
  Description of Artificial Sequence: Synthetic modified hGLP-1 peptide
  MOD_RES (29)..(29): Aib
  MOD_RES (30)..(30): D-Lys
  c-term amidation

SEQ ID NO: 441 - protein, 30 aa, Artificial Sequence; identical to SEQ ID NO: 439
  Description of Artificial Sequence: Synthetic modified hGLP-1 peptide
  MOD_RES (29)..(29): Beta-Ala
  MOD_RES (30)..(30): D-Arg
  c-term amidation

SEQ ID NO: 442 - protein, 30 aa, Artificial Sequence; identical to SEQ ID NO: 439
  Description of Artificial Sequence: Synthetic modified hGLP-1 peptide
  MOD_RES (29)..(29): Beta-Ala
  MOD_RES (30)..(30): D-Lys
  c-term amidation

SEQ ID NO: 443 - protein, 30 aa, Artificial Sequence
  Description of Artificial Sequence: Synthetic modified hGLP-1 peptide
  MOD_RES (29)..(29): Aib
  c-term amidation
HSEGTFTSDVSSYLEGQAAREFIAWLVRXR

SEQ ID NO: 444 - protein, 30 aa, Artificial Sequence; identical to SEQ ID NO: 443
  Description of Artificial Sequence: Synthetic modified hGLP-1 peptide
  MOD_RES (29)..(29): Beta-Ala
  c-term amidation

SEQ ID NO: 445 - protein, 30 aa, Artificial Sequence
  Description of Artificial Sequence: Synthetic modified hGLP-1 peptide
  MOD_RES (29)..(29): Aib
  c-term amidation
HSEGTFTSDVSSYLEGQARREFIAWLVRXR

SEQ ID NO: 446 - protein, 30 aa, Artificial Sequence; identical to SEQ ID NO: 445
  Description of Artificial Sequence: Synthetic modified hGLP-1 peptide
  MOD_RES (29)..(29): Beta-Ala
  c-term amidation

SEQ ID NO: 447 - protein, 30 aa, Artificial Sequence
  Description of Artificial Sequence: Synthetic modified hGLP-1 peptide
  MOD_RES (29)..(29): Beta-Ala
  MOD_RES (30)..(30): Lys(N-tetradecanoyl)
HSEGTFTSDVSSYLEGQAAREFIAWLVRXX

SEQ ID NO: 448 - protein, 31 aa, Artificial Sequence
  Description of Artificial Sequence: Synthetic modified hGLP-1 peptide
  MOD_RES (29)..(29): Aib
  MOD_RES (30)..(30): Lys(N-tetradecanoyl)
HSEGTFTSDVSSYLEGQAAREFIAWLVRXXG

SEQ ID NO: 449 - protein, 31 aa, Artificial Sequence
  Description of Artificial Sequence: Synthetic modified hGLP-1 peptide
  MOD_RES (29)..(29): Aib
  MOD_RES (30)..(30): Lys(N-tetradecanoyl)
  MOD_RES (31)..(31): Aib
HSEGTFTSDVSSYLEGQAAREFIAWLVRXXX

SEQ ID NO: 450 - protein, 31 aa, Artificial Sequence; identical to SEQ ID NO: 449
  Description of Artificial Sequence: Synthetic modified hGLP-1 peptide
  MOD_RES (29)..(29): Aib
  MOD_RES (30)..(30): Lys(N-tetradecanoyl)
  MOD_RES (31)..(31): D-Ala

SEQ ID NO: 451 - protein, 32 aa, Artificial Sequence
  Description of Artificial Sequence: Synthetic modified hGLP-1 peptide
  MOD_RES (29)..(29): Aib
  MOD_RES (31)..(31): Aib
  MOD_RES (32)..(32): Lys(N-tetradecanoyl)
HSEGTFTSDVSSYLEGQAAREFIAWLVRXRXX

SEQ ID NO: 452 - protein, 32 aa, Artificial Sequence; identical to SEQ ID NO: 451
  Description of Artificial Sequence: Synthetic modified hGLP-1 peptide
  MOD_RES (29)..(29): Aib
  MOD_RES (31)..(31): Beta-Ala
  MOD_RES (32)..(32): Lys(N-tetradecanoyl)

SEQ ID NO: 453 - protein, 32 aa, Artificial Sequence
  Description of Artificial Sequence: Synthetic modified hGLP-1 peptide
  MOD_RES (29)..(29): Aib
  MOD_RES (32)..(32): Lys(N-tetradecanoyl)
HSEGTFTSDVSSYLEGQAAREFIAWLVRXRGX

SEQ ID NO: 454 - protein, 31 aa, Artificial Sequence
  Description of Artificial Sequence: Synthetic modified hGLP-1 peptide
  MOD_RES (30)..(30): Lys(N-tetradecanoyl)
  MOD_RES (31)..(31): Beta-Ala
HSEGTFTSDVSSYLEGQAAREFIAWLVRGXX

SEQ ID NO: 455 - protein, 31 aa, Artificial Sequence; identical to SEQ ID NO: 454
  Description of Artificial Sequence: Synthetic modified hGLP-1 peptide
  MOD_RES (30)..(30): Lys(N-tetradecanoyl)
  MOD_RES (31)..(31): Aib

SEQ ID NO: 456 - protein, 31 aa, Artificial Sequence
  Description of Artificial Sequence: Synthetic modified hGLP-1 peptide
  MOD_RES (29)..(29): Aib
  MOD_RES (31)..(31): Ado
HSEGTFTSDVSSYLEGQAAREFIAWLVRXRX

SEQ ID NO: 457 - protein, 31 aa, Artificial Sequence; identical to SEQ ID NO: 456
  Description of Artificial Sequence: Synthetic modified hGLP-1 peptide
  MOD_RES (29)..(29): Aib
  MOD_RES (31)..(31): Ado

SEQ ID NO: 458 - protein, 31 aa, Artificial Sequence; identical to SEQ ID NO: 454
  Description of Artificial Sequence: Synthetic modified hGLP-1 peptide
  MOD_RES (30)..(30): Lys(N-tetradecanoyl)
  MOD_RES (31)..(31): D-Ala

SEQ ID NO: 459 - protein, 32 aa, Artificial Sequence
  Description of Artificial Sequence: Synthetic modified hGLP-1 peptide
  MOD_RES (31)..(31): Aib
  MOD_RES (32)..(32): Lys(N-tetradecanoyl)
HSEGTFTSDVSSYLEGQAAREFIAWLVRGRXX

SEQ ID NO: 460 - protein, 32 aa, Artificial Sequence; identical to SEQ ID NO: 459
  Description of Artificial Sequence: Synthetic modified hGLP-1 peptide
  MOD_RES (31)..(31): Beta-Ala
  MOD_RES (32)..(32): Lys(N-tetradecanoyl)

SEQ ID NO: 461 - protein, 30 aa, Artificial Sequence
  Description of Artificial Sequence: Synthetic modified hGLP-1 peptide
  MOD_RES (20)..(20): Lys(N-octanoyl)
  MOD_RES (29)..(29): Aib
  c-term amidation
HSEGTFTSDVSSYLEGQAAXEFIAWLVKXR

SEQ ID NO: 462 - protein, 30 aa, Artificial Sequence; identical to SEQ ID NO: 461
  Description of Artificial Sequence: Synthetic modified hGLP-1 peptide
  MOD_RES (20)..(20): Lys(N-tetradecanoyl)
  MOD_RES (29)..(29): Aib
  c-term amidation

SEQ ID NO: 463 - protein, 30 aa, Artificial Sequence; identical to SEQ ID NO: 461
  Description of Artificial Sequence: Synthetic modified hGLP-1 peptide
  MOD_RES (20)..(20): Lys(N-hexadecanoyl)
  MOD_RES (29)..(29): Aib
  c-term amidation

SEQ ID NO: 464 - protein, 30 aa, Artificial Sequence; identical to SEQ ID NO: 461
  Description of Artificial Sequence: Synthetic modified hGLP-1 peptide
  MOD_RES (20)..(20): Lys(N-octanoyl)
  MOD_RES (29)..(29): Beta-Ala
  c-term amidation

SEQ ID NO: 465 - protein, 30 aa, Artificial Sequence; identical to SEQ ID NO: 461
  Description of Artificial Sequence: Synthetic modified hGLP-1 peptide
  MOD_RES (20)..(20): Lys(N-tetradecanoyl)
  MOD_RES (29)..(29): Beta-Ala
  c-term amidation

SEQ ID NO: 466 - protein, 30 aa, Artificial Sequence; identical to SEQ ID NO: 461
  Description of Artificial Sequence: Synthetic modified hGLP-1 peptide
  MOD_RES (20)..(20): Lys(N-hexadecanoyl)
  MOD_RES (29)..(29): Beta-Ala
  c-term amidation

SEQ ID NO: 467 - protein, 30 aa, Artificial Sequence
  Description of Artificial Sequence: Synthetic modified hGLP-1 peptide
  MOD_RES (20)..(20): Lys(N-octanoyl)
  MOD_RES (29)..(29): Aib
  c-term amidation
HSEGTFTSDVSSYLEGQAAXEFIAWLVRXR

SEQ ID NO: 468 - protein, 30 aa, Artificial Sequence; identical to SEQ ID NO: 467
  Description of Artificial Sequence: Synthetic modified hGLP-1 peptide
  MOD_RES (20)..(20): Lys(N-tetradecanoyl)
  MOD_RES (29)..(29): Aib
  c-term amidation

SEQ ID NO: 469 - protein, 30 aa, Artificial Sequence; identical to SEQ ID NO: 467
  Description of Artificial Sequence: Synthetic modified hGLP-1 peptide
  MOD_RES (20)..(20): Lys(N-hexadecanoyl)
  MOD_RES (29)..(29): Aib
  c-term amidation

SEQ ID NO: 470 - protein, 30 aa, Artificial Sequence; identical to SEQ ID NO: 467
  Description of Artificial Sequence: Synthetic modified hGLP-1 peptide
  MOD_RES (20)..(20): Lys(N-decanoyl)
  MOD_RES (29)..(29): Aib
  c-term amidation

SEQ ID NO: 471 - protein, 30 aa, Artificial Sequence
  Description of Artificial Sequence: Synthetic modified hGLP-1 peptide
  MOD_RES (20)..(20): Lys(N-octanoyl)
  MOD_RES (29)..(29): Aib
  c-term amidation
HSEGTFTSDVSSYLEGQAKXEFIAWLVRXR

SEQ ID NO: 472 - protein, 30 aa, Artificial Sequence; identical to SEQ ID NO: 471
  Description of Artificial Sequence: Synthetic modified hGLP-1 peptide
  MOD_RES (20)..(20): Lys(N-tetradecanoyl)
  MOD_RES (29)..(29): Aib
  c-term amidation

SEQ ID NO: 473 - protein, 30 aa, Artificial Sequence; identical to SEQ ID NO: 471
  Description of Artificial Sequence: Synthetic modified hGLP-1 peptide
  MOD_RES (20)..(20): Lys(N-hexadecanoyl)
  MOD_RES (29)..(29): Aib
  c-term amidation

SEQ ID NO: 474 - protein, 30 aa, Artificial Sequence
  Description of Artificial Sequence: Synthetic modified hGLP-1 peptide
  MOD_RES (20)..(20): Lys(N-octanoyl)
  MOD_RES (29)..(29): Aib
  c-term amidation
HSEGTFTSDVSSYLEGQARXEFIAWLVRXR

SEQ ID NO: 475 - protein, 30 aa, Artificial Sequence; identical to SEQ ID NO: 474
  Description of Artificial Sequence: Synthetic modified hGLP-1 peptide
  MOD_RES (20)..(20): Lys(N-tetradecanoyl)
  MOD_RES (29)..(29): Aib
  c-term amidation

SEQ ID NO: 476 - protein, 30 aa, Artificial Sequence; identical to SEQ ID NO: 474
  Description of Artificial Sequence: Synthetic modified hGLP-1 peptide
  MOD_RES (20)..(20): Lys(N-hexadecanoyl)
  MOD_RES (29)..(29): Aib
  c-term amidation

SEQ ID NO: 477 - protein, 30 aa, Artificial Sequence; identical to SEQ ID NO: 474
  Description of Artificial Sequence: Synthetic modified hGLP-1 peptide
  MOD_RES (20)..(20): Lys(N-decanoyl)
  MOD_RES (29)..(29): Aib
  c-term amidation

SEQ ID NO: 478 - protein, 30 aa, Artificial Sequence; identical to SEQ ID NO: 467
  Description of Artificial Sequence: Synthetic modified hGLP-1 peptide
  MOD_RES (20)..(20): Lys(N-octanoyl)
  MOD_RES (29)..(29): Beta-Ala
  c-term amidation

SEQ ID NO: 479 - protein, 30 aa, Artificial Sequence; identical to SEQ ID NO: 467
  Description of Artificial Sequence: Synthetic modified hGLP-1 peptide
  MOD_RES (20)..(20): Lys(N-tetradecanoyl)
  MOD_RES (29)..(29): Beta-Ala
  c-term amidation

SEQ ID NO: 480 - protein, 30 aa, Artificial Sequence; identical to SEQ ID NO: 467
  Description of Artificial Sequence: Synthetic modified hGLP-1 peptide
  MOD_RES (20)..(20): Lys(N-hexadecanoyl)
  MOD_RES (29)..(29): Beta-Ala
  c-term amidation

SEQ ID NO: 481 - protein, 30 aa, Artificial Sequence; identical to SEQ ID NO: 467
  Description of Artificial Sequence: Synthetic modified hGLP-1 peptide
  MOD_RES (20)..(20): Lys(N-decanoyl)
  MOD_RES (29)..(29): Beta-Ala
  c-term amidation

SEQ ID NO: 482 - protein, 30 aa, Artificial Sequence
  Description of Artificial Sequence: Synthetic modified hGLP-1 peptide
  MOD_RES (28)..(28): Lys(N-octanoyl)
  MOD_RES (29)..(29): Aib
  c-term amidation
HSEGTFTSDVSSYLEGQAAKEFIAWLVXXR

SEQ ID NO: 483 - protein, 30 aa, Artificial Sequence; identical to SEQ ID NO: 482
  Description of Artificial Sequence: Synthetic modified hGLP-1 peptide
  MOD_RES (28)..(28): Lys(N-tetradecanoyl)
  MOD_RES (29)..(29): Aib
  c-term amidation

SEQ ID NO: 484 - protein, 30 aa, Artificial Sequence; identical to SEQ ID NO: 482
  Description of Artificial Sequence: Synthetic modified hGLP-1 peptide
  MOD_RES (28)..(28): Lys(N-hexadecanoyl)
  MOD_RES (29)..(29): Aib
  c-term amidation

SEQ ID NO: 485 - protein, 30 aa, Artificial Sequence
  Description of Artificial Sequence: Synthetic modified hGLP-1 peptide
  MOD_RES (28)..(28): Lys(N-octanoyl)
  MOD_RES (29)..(29): Aib
  c-term amidation
HSEGTFTSDVSSYLEGQAAREFIAWLVXXR

SEQ ID NO: 486 - protein, 30 aa, Artificial Sequence; identical to SEQ ID NO: 485
  Description of Artificial Sequence: Synthetic modified hGLP-1 peptide
  MOD_RES (28)..(28): Lys(N-hexadecanoyl)
  MOD_RES (29)..(29): Aib
  c-term amidation

SEQ ID NO: 487 - protein, 30 aa, Artificial Sequence; identical to SEQ ID NO: 485
  Description of Artificial Sequence: Synthetic modified hGLP-1 peptide
  MOD_RES (28)..(28): Lys(N-decanoyl)
  MOD_RES (29)..(29): Aib
  c-term amidation

SEQ ID NO: 488 - protein, 30 aa, Artificial Sequence
  Description of Artificial Sequence: Synthetic modified hGLP-1 peptide
  MOD_RES (28)..(28): Lys(N-octanoyl)
  MOD_RES (29)..(29): Aib
  c-term amidation
HSEGTFTSDVSSYLEGQARREFIAWLVXXR

SEQ ID NO: 489 - protein, 30 aa, Artificial Sequence; identical to SEQ ID NO: 488
  Description of Artificial Sequence: Synthetic modified hGLP-1 peptide
  MOD_RES (28)..(28): Lys(N-tetradecanoyl)
  MOD_RES (29)..(29): Aib
  c-term amidation

SEQ ID NO: 490 - protein, 30 aa, Artificial Sequence; identical to SEQ ID NO: 488
  Description of Artificial Sequence: Synthetic modified hGLP-1 peptide
  MOD_RES (28)..(28): Lys(N-hexadecanoyl)
  MOD_RES (29)..(29): Aib
  c-term amidation

SEQ ID NO: 491 - protein, 30 aa, Artificial Sequence; identical to SEQ ID NO: 488
  Description of Artificial Sequence: Synthetic modified hGLP-1 peptide
  MOD_RES (28)..(28): Lys(N-decanoyl)
  MOD_RES (29)..(29): Aib
  c-term amidation

SEQ ID NO: 492 - protein, 30 aa, Artificial Sequence
  Description of Artificial Sequence: Synthetic modified hGLP-1 peptide
  MOD_RES (28)..(28): Lys(N-octanoyl)
  MOD_RES (29)..(29): Aib
  c-term amidation
HSEGTFTSDVSSYLEGQAKREFIAWLVXXR

SEQ ID NO: 493 - protein, 30 aa, Artificial Sequence; identical to SEQ ID NO: 492
  Description of Artificial Sequence: Synthetic modified hGLP-1 peptide
  MOD_RES (28)..(28): Lys(N-tetradecanoyl)
  MOD_RES (29)..(29): Aib
  c-term amidation

SEQ ID NO: 494 - protein, 30 aa, Artificial Sequence; identical to SEQ ID NO: 492
  Description of Artificial Sequence: Synthetic modified hGLP-1 peptide
  MOD_RES (28)..(28): Lys(N-hexadecanoyl)
  MOD_RES (29)..(29): Aib
  c-term amidation

SEQ ID NO: 495 - protein, 30 aa, Artificial Sequence; identical to SEQ ID NO: 439
  Description of Artificial Sequence: Synthetic modified hGLP-1 peptide
  MOD_RES (29)..(29): Aib
  MOD_RES (30)..(30): Lys(N-octanoyl)
  c-term amidation

SEQ ID NO: 496 - protein, 30 aa, Artificial Sequence; identical to SEQ ID NO: 439
  Description of Artificial Sequence: Synthetic modified hGLP-1 peptide
  MOD_RES (29)..(29): Aib
  MOD_RES (30)..(30): Lys(N-tetradecanoyl)
  c-term amidation

SEQ ID NO: 497 - protein, 30 aa, Artificial Sequence; identical to SEQ ID NO: 439
  Description of Artificial Sequence: Synthetic modified hGLP-1 peptide
  MOD_RES (29)..(29): Aib
  MOD_RES (30)..(30): Lys(N-hexadecanoyl)
  c-term amidation

SEQ ID NO: 498 - protein, 30 aa, Artificial Sequence
  Description of Artificial Sequence: Synthetic modified hGLP-1 peptide
  MOD_RES (29)..(29): Aib
  MOD_RES (30)..(30): Lys(N-octanoyl)
  c-term amidation
HSEGTFTSDVSSYLEGQAAREFIAWLVKXX

SEQ ID NO: 499 - protein, 30 aa, Artificial Sequence; identical to SEQ ID NO: 498
  Description of Artificial Sequence: Synthetic modified hGLP-1 peptide
  MOD_RES (29)..(29): Aib
  MOD_RES (30)..(30): Lys(N-tetradecanoyl)
  c-term amidation

SEQ ID NO: 500 - protein, 30 aa, Artificial Sequence; identical to SEQ ID NO: 498
  Description of Artificial Sequence: Synthetic modified hGLP-1 peptide
  MOD_RES (29)..(29): Aib
  MOD_RES (30)..(30): Lys(N-hexadecanoyl)
  c-term amidation

SEQ ID NO: 501 - protein, 30 aa, Artificial Sequence; identical to SEQ ID NO: 447
  Description of Artificial Sequence: Synthetic modified hGLP-1 peptide
  MOD_RES (29)..(29): Aib
  MOD_RES (30)..(30): Lys(N-octanoyl)
  c-term amidation

SEQ ID NO: 502 - protein, 30 aa, Artificial Sequence; identical to SEQ ID NO: 447
  Description of Artificial Sequence: Synthetic modified hGLP-1 peptide
  MOD_RES (29)..(29): Aib
  MOD_RES (30)..(30): Lys(N-hexadecanoyl)
  c-term amidation

SEQ ID NO: 503 - protein, 32 aa, Artificial Sequence; identical to SEQ ID NO: 453
  Description of Artificial Sequence: Synthetic modified hGLP-1 peptide
  MOD_RES (29)..(29): Aib
  MOD_RES (32)..(32): Lys(N-octanoyl)
  c-term amidation

SEQ ID NO: 504 - protein, 32 aa, Artificial Sequence; identical to SEQ ID NO: 453
  Description of Artificial Sequence: Synthetic modified hGLP-1 peptide
  MOD_RES (29)..(29): Aib
  MOD_RES (32)..(32): Lys(N-decanoyl)
  c-term amidation

SEQ ID NO: 505 - protein, 32 aa, Artificial Sequence; identical to SEQ ID NO: 453
  Description of Artificial Sequence: Synthetic modified hGLP-1 peptide
  MOD_RES (29)..(29): Aib
  MOD_RES (32)..(32): Lys(N-tetradecanoyl)
  c-term amidation

SEQ ID NO: 506 - protein, 32 aa, Artificial Sequence; identical to SEQ ID NO: 453
  Description of Artificial Sequence: Synthetic modified hGLP-1 peptide
  MOD_RES (29)..(29): Aib
  MOD_RES (32)..(32): Lys(N-hexadecanoyl)
  c-term amidation

SEQ ID NO: 507 - protein, 32 aa, Artificial Sequence
  Description of Artificial Sequence: Synthetic modified hGLP-1 peptide
  MOD_RES (29)..(29): Aib
  MOD_RES (31)..(31): Aib
  MOD_RES (32)..(32): Lys(N-octanoyl)
  c-term amidation
HSEGTFTSDVSSYLEGQARREFIAWLVRXRXX

SEQ ID NO: 508 - protein, 32 aa, Artificial Sequence; identical to SEQ ID NO: 507
  Description of Artificial Sequence: Synthetic modified hGLP-1 peptide
  MOD_RES (29)..(29): Aib
  MOD_RES (31)..(31): Aib
  MOD_RES (32)..(32): Lys(N-decanoyl)
  c-term amidation

SEQ ID NO: 509 - protein, 32 aa, Artificial Sequence; identical to SEQ ID NO: 507
  Description of Artificial Sequence: Synthetic modified hGLP-1 peptide
  MOD_RES (29)..(29): Aib
  MOD_RES (31)..(31): Aib
  MOD_RES (32)..(32): Lys(N-tetradecanoyl)
  c-term amidation

SEQ ID NO: 510 - protein, 32 aa, Artificial Sequence; identical to SEQ ID NO: 507
  Description of Artificial Sequence: Synthetic modified hGLP-1 peptide
  MOD_RES (29)..(29): Aib
  MOD_RES (31)..(31): Aib
  MOD_RES (32)..(32): Lys(N-hexadecanoyl)
  c-term amidation

SEQ ID NO: 511 - protein, 32 aa, Artificial Sequence; identical to SEQ ID NO: 451
  Description of Artificial Sequence: Synthetic modified hGLP-1 peptide
  MOD_RES (29)..(29): Aib
  MOD_RES (31)..(31): Aib
  MOD_RES (32)..(32): Lys(N-octanoyl))
  c-term amidation

SEQ ID NO: 512 - protein, 32 aa, Artificial Sequence; identical to SEQ ID NO: 451
  Description of Artificial Sequence: Synthetic modified hGLP-1 peptide
  MOD_RES (29)..(29): Aib
  MOD_RES (31)..(31): Aib
  MOD_RES (32)..(32): Lys(N-decanoyl)
  c-term amidation

SEQ ID NO: 513 - protein, 32 aa, Artificial Sequence; identical to SEQ ID NO: 451
  Description of Artificial Sequence: Synthetic modified hGLP-1 peptide
  MOD_RES (29)..(29): Aib
  MOD_RES (31)..(31): Aib
  MOD_RES (32)..(32): Lys(N-hexadecanoyl)
  c-term amidation

SEQ ID NO: 514 - protein, 30 aa, Artificial Sequence
  Description of Artificial Sequence: Synthetic modified hGLP-1 peptide
  MOD_RES (29)..(29): Aib
  MOD_RES (30)..(30): Lys(N-octanoyl)
  c-term amidation
HSEGTFTSDVSSYLEGQAKREFIAWLVRXX

SEQ ID NO: 515 - protein, 30 aa, Artificial Sequence; identical to SEQ ID NO: 514
  Description of Artificial Sequence: Synthetic modified hGLP-1 peptide
  MOD_RES (29)..(29): Aib
  MOD_RES (30)..(30): Lys(N-tetradecanoyl)
  c-term amidation

SEQ ID NO: 516 - protein, 30 aa, Artificial Sequence; identical to SEQ ID NO: 514
  Description of Artificial Sequence: Synthetic modified hGLP-1 peptide
  MOD_RES (29)..(29): Aib
  MOD_RES (30)..(30): Lys(N-hexadecanoyl)
  c-term amidation

SEQ ID NO: 517 - protein, 30 aa, Artificial Sequence
  Description of Artificial Sequence: Synthetic modified hGLP-1 peptide
  MOD_RES (29)..(29): Aib
  MOD_RES (30)..(30): Lys(N-octanoyl)
  c-term amidation
HSEGTFTSDVSSYLEGQARREFIAWLVRXX

SEQ ID NO: 518 - protein, 30 aa, Artificial Sequence; identical to SEQ ID NO: 517
  Description of Artificial Sequence: Synthetic modified hGLP-1 peptide
  MOD_RES (29)..(29): Aib
  MOD_RES (30)..(30): Lys(N-tetradecanoyl)
  c-term amidation

SEQ ID NO: 519 - protein, 30 aa, Artificial Sequence; identical to SEQ ID NO: 517
  Description of Artificial Sequence: Synthetic modified hGLP-1 peptide
  MOD_RES (29)..(29): Aib
  MOD_RES (30)..(30): Lys(N-hexadecanoyl)
  c-term amidation

SEQ ID NO: 520 - protein, 30 aa, Artificial Sequence; identical to SEQ ID NO: 517
  Description of Artificial Sequence: Synthetic modified hGLP-1 peptide
  MOD_RES (29)..(29): Aib
  MOD_RES (30)..(30): Lys(N-decanoyl)
  c-term amidation

SEQ ID NO: 521 - protein, 30 aa, Artificial Sequence; identical to SEQ ID NO: 482
  Description of Artificial Sequence: Synthetic modified hGLP-1 peptide
  MOD_RES (28)..(28): Lys(N-octanoyl)
  MOD_RES (29)..(29): Beta-Ala
  c-term amidation

SEQ ID NO: 522 - protein, 30 aa, Artificial Sequence; identical to SEQ ID NO: 482
  Description of Artificial Sequence: Synthetic modified hGLP-1 peptide
  MOD_RES (28)..(28): Lys(N-tetradecanoyl)
  MOD_RES (29)..(29): Beta-Ala
  c-term amidation

SEQ ID NO: 523 - protein, 30 aa, Artificial Sequence; identical to SEQ ID NO: 482
  Description of Artificial Sequence: Synthetic modified hGLP-1 peptide
  MOD_RES (28)..(28): Lys(N-hexadecanoyl)
  MOD_RES (29)..(29): Beta-Ala
  c-term amidation

SEQ ID NO: 524 - protein, 30 aa, Artificial Sequence
  Description of Artificial Sequence: Synthetic modified hGLP-1 peptide
  MOD_RES (26)..(26): A6c
  MOD_RES (28)..(28): Lys(N-octanoyl)
  MOD_RES (29)..(29): Beta-Ala
  c-term amidation
HSEGTFTSDVSSYLEGQAAKEFIAWXVXXR

SEQ ID NO: 525 - protein, 30 aa, Artificial Sequence
  Description of Artificial Sequence: Synthetic modified hGLP-1 peptide
  MOD_RES (28)..(28): Lys(N-octanoyl)
  MOD_RES (29)..(29): Beta-Ala
  c-term amidation
HSEGTFTSDVSSYLEGEAAKEFIAWLVXXR

SEQ ID NO: 526 - protein, 30 aa, Artificial Sequence
  Description of Artificial Sequence: Synthetic modified hGLP-1 peptide
  MOD_RES (26)..(26): A6c
  MOD_RES (28)..(28): Lys(N-octanoyl)
  MOD_RES (29)..(29): Beta-Ala
  c-term amidation
HSEGTFTSDVSSYLEGEAAKEFIAWXVXXR

SEQ ID NO: 527 - protein, 30 aa, Artificial Sequence; identical to SEQ ID NO: 485
  Description of Artificial Sequence: Synthetic modified hGLP-1 peptide
  MOD_RES (28)..(28): Lys(N-octanoyl)
  MOD_RES (29)..(29): Beta-Ala
  c-term amidation

SEQ ID NO: 528 - protein, 30 aa, Artificial Sequence; identical to SEQ ID NO: 485
  Description of Artificial Sequence: Synthetic modified hGLP-1 peptide
  MOD_RES (28)..(28): Lys(N-tetradecanoyl)
  MOD_RES (29)..(29): Beta-Ala
  c-term amidation

SEQ ID NO: 529 - protein, 30 aa, Artificial Sequence; identical to SEQ ID NO: 485
  Description of Artificial Sequence: Synthetic modified hGLP-1 peptide
  MOD_RES (28)..(28): Lys(N-hexadecanoyl)
  MOD_RES (29)..(29): Beta-Ala
  c-term amidation

SEQ ID NO: 530 - protein, 30 aa, Artificial Sequence; identical to SEQ ID NO: 485
  Description of Artificial Sequence: Synthetic modified hGLP-1 peptide
  MOD_RES (28)..(28): Lys(N-decanoyl)
  MOD_RES (29)..(29): Beta-Ala
  c-term amidation

SEQ ID NO: 531 - protein, 30 aa, Artificial Sequence; identical to SEQ ID NO: 488
  Description of Artificial Sequence: Synthetic modified hGLP-1 peptide
  MOD_RES (28)..(28): Lys(N-octanoyl)
  MOD_RES (29)..(29): Beta-Ala
  c-term amidation

SEQ ID NO: 532 - protein, 30 aa, Artificial Sequence; identical to SEQ ID NO: 488
  Description of Artificial Sequence: Synthetic modified hGLP-1 peptide
  MOD_RES (28)..(28): Lys(N-tetradecanoyl)
  MOD_RES (29)..(29): Beta-Ala
  c-term amidation

SEQ ID NO: 533 - protein, 30 aa, Artificial Sequence; identical to SEQ ID NO: 488
  Description of Artificial Sequence: Synthetic modified hGLP-1 peptide
  MOD_RES (28)..(28): Lys(N-hexadecanoyl)
  MOD_RES (29)..(29): Beta-Ala
  c-term amidation

SEQ ID NO: 534 - protein, 30 aa, Artificial Sequence; identical to SEQ ID NO: 488
  Description of Artificial Sequence: Synthetic modified hGLP-1 peptide
  MOD_RES (28)..(28): Lys(N-decanoyl)
  MOD_RES (29)..(29): Beta-Ala
  c-term amidation

SEQ ID NO: 535 - protein, 30 aa, Artificial Sequence; identical to SEQ ID NO: 492
  Description of Artificial Sequence: Synthetic modified hGLP-1 peptide
  MOD_RES (28)..(28): Lys(N-octanoyl)
  MOD_RES (29)..(29): Beta-Ala
  c-term amidation

SEQ ID NO: 536 - protein, 30 aa, Artificial Sequence; identical to SEQ ID NO: 492
  Description of Artificial Sequence: Synthetic modified hGLP-1 peptide
  MOD_RES (28)..(28): Lys(N-tetradecanoyl)
  MOD_RES (29)..(29): Beta-Ala
  c-term amidation

SEQ ID NO: 537 - protein, 30 aa, Artificial Sequence; identical to SEQ ID NO: 492
  Description of Artificial Sequence: Synthetic modified hGLP-1 peptide
  MOD_RES (28)..(28): Lys(N-hexadecanoyl)
  MOD_RES (29)..(29): Beta-Ala
  c-term amidation

SEQ ID NO: 538 - protein, 30 aa, Artificial Sequence; identical to SEQ ID NO: 439
  Description of Artificial Sequence: Synthetic modified hGLP-1 peptide
  MOD_RES (29)..(29): Beta-Ala
  MOD_RES (30)..(30): Lys(N-octanoyl)
  c-term amidation

SEQ ID NO: 539 - protein, 30 aa, Artificial Sequence; identical to SEQ ID NO: 439
  Description of Artificial Sequence: Synthetic modified hGLP-1 peptide
  MOD_RES (29)..(29): Beta-Ala
  MOD_RES (30)..(30): Lys(N-tetradecanoyl)
  c-term amidation

SEQ ID NO: 540 - protein, 30 aa, Artificial Sequence; identical to SEQ ID NO: 439
  Description of Artificial Sequence: Synthetic modified hGLP-1 peptide
  MOD_RES (29)..(29): Beta-Ala
  MOD_RES (30)..(30): Lys(N-hexadecanoyl)
  c-term amidation

SEQ ID NO: 541 - protein, 30 aa, Artificial Sequence; identical to SEQ ID NO: 498
  Description of Artificial Sequence: Synthetic modified hGLP-1 peptide
  MOD_RES (29)..(29): Beta-Ala
  MOD_RES (30)..(30): Lys(N-octanoyl)
  c-term amidation

SEQ ID NO: 542 - protein, 30 aa, Artificial Sequence; identical to SEQ ID NO: 498
  Description of Artificial Sequence: Synthetic modified hGLP-1 peptide
  MOD_RES (29)..(29): Beta-Ala
  MOD_RES (30)..(30): Lys(N-tetradecanoyl)
  c-term amidation

SEQ ID NO: 543 - protein, 30 aa, Artificial Sequence; identical to SEQ ID NO: 498
  Description of Artificial Sequence: Synthetic modified hGLP-1 peptide
  MOD_RES (29)..(29): Beta-Ala
  MOD_RES (30)..(30): Lys(N-hexadecanoyl)
  c-term amidation

SEQ ID NO: 544 - protein, 30 aa, Artificial Sequence; identical to SEQ ID NO: 447
  Description of Artificial Sequence: Synthetic modified hGLP-1 peptide
  MOD_RES (29)..(29): Beta-Ala
  MOD_RES (30)..(30): Lys(N-octanoyl)
  c-term amidation

SEQ ID NO: 545 - protein, 30 aa, Artificial Sequence; identical to SEQ ID NO: 447
  Description of Artificial Sequence: Synthetic modified hGLP-1 peptide
  MOD_RES (29)..(29): Beta-Ala
  MOD_RES (30)..(30): Lys(N-tetradecanoyl)
  c-term amidation

SEQ ID NO: 546 - protein, 30 aa, Artificial Sequence; identical to SEQ ID NO: 447
  Description of Artificial Sequence: Synthetic modified hGLP-1 peptide
  MOD_RES (29)..(29): Beta-Ala
  MOD_RES (30)..(30): Lys(N-hexadecanoyl)
  c-term amidation

SEQ ID NO: 547 - protein, 30 aa, Artificial Sequence; identical to SEQ ID NO: 447
  Description of Artificial Sequence: Synthetic modified hGLP-1 peptide
  MOD_RES (29)..(29): Beta-Ala
  MOD_RES (30)..(30): Lys(N-decanoyl)
  c-term amidation

SEQ ID NO: 548 - protein, 30 aa, Artificial Sequence; identical to SEQ ID NO: 514
  Description of Artificial Sequence: Synthetic modified hGLP-1 peptide
  MOD_RES (29)..(29): Beta-Ala
  MOD_RES (30)..(30): Lys(N-octanoyl)
  c-term amidation

SEQ ID NO: 549 - protein, 30 aa, Artificial Sequence; identical to SEQ ID NO: 514
  Description of Artificial Sequence: Synthetic modified hGLP-1 peptide
  MOD_RES (29)..(29): Beta-Ala
  MOD_RES (30)..(30): Lys(N-tetradecanoyl)
  c-term amidation

SEQ ID NO: 550 - protein, 30 aa, Artificial Sequence; identical to SEQ ID NO: 514
  Description of Artificial Sequence: Synthetic modified hGLP-1 peptide
  MOD_RES (29)..(29): Beta-Ala
  MOD_RES (30)..(30): Lys(N-hexadecanoyl)
  c-term amidation

SEQ ID NO: 551 - protein, 30 aa, Artificial Sequence; identical to SEQ ID NO: 517
  Description of Artificial Sequence: Synthetic modified hGLP-1 peptide
  MOD_RES (29)..(29): Beta-Ala
  MOD_RES (30)..(30): Lys(N-octanoyl)
  c-term amidation

SEQ ID NO: 552 - protein, 30 aa, Artificial Sequence; identical to SEQ ID NO: 517
  Description of Artificial Sequence: Synthetic modified hGLP-1 peptide
  MOD_RES (29)..(29): Beta-Ala
  MOD_RES (30)..(30): Lys(N-tetradecanoyl)
  c-term amidation

SEQ ID NO: 553 - protein, 30 aa, Artificial Sequence; identical to SEQ ID NO: 517
  Description of Artificial Sequence: Synthetic modified hGLP-1 peptide
  MOD_RES (29)..(29): Beta-Ala
  MOD_RES (30)..(30): Lys(N-hexadecanoyl)
  c-term amidation

SEQ ID NO: 554 - protein, 30 aa, Artificial Sequence; identical to SEQ ID NO: 517
  Description of Artificial Sequence: Synthetic modified hGLP-1 peptide
  MOD_RES (29)..(29): Beta-Ala
  MOD_RES (30)..(30): Lys(N-decanoyl)
  c-term amidation

SEQ ID NO: 555 - protein, 30 aa, Artificial Sequence
  Description of Artificial Sequence: Synthetic modified hGLP-1 peptide
  MOD_RES (20)..(20): Lys(N-octanoyl)
  MOD_RES (26)..(26): A6c
  MOD_RES (29)..(29): Aib
  c-term amidation
HSEGTFTSDVSSYLEGQAAXEFIAWXVRXR

SEQ ID NO: 556 - protein, 30 aa, Artificial Sequence; identical to SEQ ID NO: 555
  Description of Artificial Sequence: Synthetic modified hGLP-1 peptide
  MOD_RES (20)..(20): Lys(N-tetradecanoyl)
  MOD_RES (26)..(26): A6c
  MOD_RES (29)..(29): Aib
  c-term amidation

SEQ ID NO: 557 - protein, 30 aa, Artificial Sequence; identical to SEQ ID NO: 555
  Description of Artificial Sequence: Synthetic modified hGLP-1 peptide
  MOD_RES (20)..(20): Lys(N-hexadecanoyl)
  MOD_RES (26)..(26): A6c
  MOD_RES (29)..(29): Aib
  c-term amidation

SEQ ID NO: 558 - protein, 30 aa, Artificial Sequence; identical to SEQ ID NO: 524
  Description of Artificial Sequence: Synthetic modified hGLP-1 peptide
  MOD_RES (26)..(26): A6c
  MOD_RES (28)..(28): Lys(N-octanoyl)
  MOD_RES (29)..(29): Aib
  c-term amidation

SEQ ID NO: 559 - protein, 30 aa, Artificial Sequence; identical to SEQ ID NO: 524
  Description of Artificial Sequence: Synthetic modified hGLP-1 peptide
  MOD_RES (26)..(26): A6c
  MOD_RES (28)..(28): Lys(N-tetradecanoyl)
  MOD_RES (29)..(29): Aib
  c-term amidation

SEQ ID NO: 560 - protein, 30 aa, Artificial Sequence; identical to SEQ ID NO: 524
  Description of Artificial Sequence: Synthetic modified hGLP-1 peptide
  MOD_RES (26)..(26): A6c
  MOD_RES (28)..(28): Lys(N-hexadecanoyl)
  MOD_RES (29)..(29): Aib
  c-term amidation

SEQ ID NO: 561 - protein, 30 aa, Artificial Sequence; identical to SEQ ID NO: 524
  Description of Artificial Sequence: Synthetic modified hGLP-1 peptide
  MOD_RES (26)..(26): A6c
  MOD_RES (28)..(28): Lys(N-octanoyl)
  MOD_RES (29)..(29): Aib
  c-term amidation

SEQ ID NO: 562 - protein, 30 aa, Artificial Sequence
  Description of Artificial Sequence: Synthetic modified hGLP-1 peptide
  MOD_RES (26)..(26): A6c
  MOD_RES (28)..(28): Lys(N-tetradecanoyl)
  MOD_RES (29)..(29): Aib
  c-term amidation
HSEGTFTSDVSSYLEGQAAREFIAWXVXXR

SEQ ID NO: 563 - protein, 30 aa, Artificial Sequence
  Description of Artificial Sequence: Synthetic modified hGLP-1 peptide
  MOD_RES (26)..(26): A6c
  MOD_RES (29)..(29): Aib
  MOD_RES (30)..(30): Lys(N-octanoyl)
  c-term amidation
HSEGTFTSDVSSYLEGQAAKEFIAWXVKXX

SEQ ID NO: 564 - protein, 30 aa, Artificial Sequence; identical to SEQ ID NO: 563
  Description of Artificial Sequence: Synthetic modified hGLP-1 peptide
  MOD_RES (26)..(26): A6c
  MOD_RES (29)..(29): Aib
  MOD_RES (30)..(30): Lys(N-tetradecanoyl)
  c-term amidation

SEQ ID NO: 565 - protein, 30 aa, Artificial Sequence; identical to SEQ ID NO: 563
  Description of Artificial Sequence: Synthetic modified hGLP-1 peptide
  MOD_RES (26)..(26): A6c
  MOD_RES (29)..(29): Aib
  MOD_RES (30)..(30): Lys(N-hexadecanoyl)
  c-term amidation

SEQ ID NO: 566 - protein, 30 aa, Artificial Sequence
  Description of Artificial Sequence: Synthetic modified hGLP-1 peptide
  MOD_RES (26)..(26): A6c
  MOD_RES (29)..(29): Aib
  MOD_RES (30)..(30): Lys(N-octanoyl)
  c-term amidation
HSEGTFTSDVSSYLEGQAAREFIAWXVKXX

SEQ ID NO: 567 - protein, 30 aa, Artificial Sequence; identical to SEQ ID NO: 566
  Description of Artificial Sequence: Synthetic modified hGLP-1 peptide
  MOD_RES (26)..(26): A6c
  MOD_RES (29)..(29): Aib
  MOD_RES (30)..(30): Lys(N-tetradecanoyl)
  c-term amidation

SEQ ID NO: 568 - protein, 30 aa, Artificial Sequence; identical to SEQ ID NO: 566
  Description of Artificial Sequence: Synthetic modified hGLP-1 peptide
  MOD_RES (26)..(26): A6c
  MOD_RES (29)..(29): Aib
  MOD_RES (30)..(30): Lys(N-hexadecanoyl)
  c-term amidation

SEQ ID NO: 569 - protein, 30 aa, Artificial Sequence
  Description of Artificial Sequence: Synthetic modified hGLP-1 peptide
  MOD_RES (26)..(26): A6c
  MOD_RES (29)..(29): Aib
  MOD_RES (30)..(30): Lys(N-octanoyl)
  c-term amidation
HSEGTFTSDVSSYLEGQAAREFIAWXVRXX

SEQ ID NO: 570 - protein, 30 aa, Artificial Sequence; identical to SEQ ID NO: 569
  Description of Artificial Sequence: Synthetic modified hGLP-1 peptide
  MOD_RES (26)..(26): A6c
  MOD_RES (29)..(29): Aib
  MOD_RES (30)..(30): Lys(N-decanoyl)
  c-term amidation

SEQ ID NO: 571 - protein, 30 aa, Artificial Sequence; identical to SEQ ID NO: 569
  Description of Artificial Sequence: Synthetic modified hGLP-1 peptide
  MOD_RES (26)..(26): A6c
  MOD_RES (29)..(29): Aib
  MOD_RES (30)..(30): Lys(N-tetradecanoyl)
  c-term amidation

SEQ ID NO: 572 - protein, 30 aa, Artificial Sequence; identical to SEQ ID NO: 569
  Description of Artificial Sequence: Synthetic modified hGLP-1 peptide
  MOD_RES (26)..(26): A6c
  MOD_RES (29)..(29): Aib
  MOD_RES (30)..(30): Lys(N-hexadecanoyl)
  c-term amidation

SEQ ID NO: 573 - protein, 30 aa, Artificial Sequence
  Description of Artificial Sequence: Synthetic modified hGLP-1 peptide
  MOD_RES (18)..(18): Aib
  MOD_RES (20)..(20): Lys(N-octanoyl)
  MOD_RES (29)..(29): Aib
  c-term amidation
HSEGTFTSDVSSYLEGQXAXEFIAWLVRXR

SEQ ID NO: 574 - protein, 30 aa, Artificial Sequence; identical to SEQ ID NO: 573
  Description of Artificial Sequence: Synthetic modified hGLP-1 peptide
  MOD_RES (18)..(18): Aib
  MOD_RES (20)..(20): Lys(N-tetradecanoyl)
  MOD_RES (29)..(29): Aib
  c-term amidation

SEQ ID NO: 575 - protein, 30 aa, Artificial Sequence; identical to SEQ ID NO: 573
  Description of Artificial Sequence: Synthetic modified hGLP-1 peptide
  MOD_RES (18)..(18): Aib
  MOD_RES (20)..(20): Lys(N-hexadecanoyl)
  MOD_RES (29)..(29): Aib
  c-term amidation

SEQ ID NO: 576 - protein, 30 aa, Artificial Sequence
  Description of Artificial Sequence: Synthetic modified hGLP-1 peptide
  MOD_RES (18)..(18): Aib
  MOD_RES (28)..(28): Lys(N-octanoyl)
  MOD_RES (29)..(29): Aib
  c-term amidation
HSEGTFTSDVSSYLEGQXAREFIAWLVXXR

SEQ ID NO: 577 - protein, 30 aa, Artificial Sequence; identical to SEQ ID NO: 576
  Description of Artificial Sequence: Synthetic modified hGLP-1 peptide
  MOD_RES (18)..(18): Aib
  MOD_RES (28)..(28): Lys(N-tetradecanoyl)
  MOD_RES (29)..(29): Aib
  c-term amidation

SEQ ID NO: 578 - protein, 30 aa, Artificial Sequence; identical to SEQ ID NO: 576
  Description of Artificial Sequence: Synthetic modified hGLP-1 peptide
  MOD_RES (18)..(18): Aib
  MOD_RES (28)..(28): Lys(N-hexadecanoyl)
  MOD_RES (29)..(29): Aib
  c-term amidation

SEQ ID NO: 579 - protein, 30 aa, Artificial Sequence
  Description of Artificial Sequence: Synthetic modified hGLP-1 peptide
  MOD_RES (18)..(18): Aib
  MOD_RES (29)..(29): Aib
  MOD_RES (30)..(30): Lys(N-octanoyl)
  c-term amidation
HSEGTFTSDVSSYLEGQXAREFIAWLVRXX

SEQ ID NO: 580 - protein, 30 aa, Artificial Sequence; identical to SEQ ID NO: 579
  Description of Artificial Sequence: Synthetic modified hGLP-1 peptide
  MOD_RES (18)..(18): Aib
  MOD_RES (29)..(29): Aib
  MOD_RES (30)..(30): Lys(N-tetradecanoyl)
  c-term amidation

SEQ ID NO: 581 - protein, 30 aa, Artificial Sequence; identical to SEQ ID NO: 579
  Description of Artificial Sequence: Synthetic modified hGLP-1 peptide
  MOD_RES (18)..(18): Aib
  MOD_RES (29)..(29): Aib
  MOD_RES (30)..(30): Lys(N-hexadecanoyl)
  c-term amidation

SEQ ID NO: 582 - protein, 30 aa, Artificial Sequence; identical to SEQ ID NO: 436
  Description of Artificial Sequence: Synthetic modified hGLP-1 peptide
  MOD_RES (18)..(18): Aib
  MOD_RES (26)..(26): A6c
  MOD_RES (28)..(28): Lys(N-octanoyl)
  MOD_RES (29)..(29): Aib
  c-term amidation

SEQ ID NO: 583 - protein, 30 aa, Artificial Sequence
  Description of Artificial Sequence: Synthetic modified hGLP-1 peptide
  MOD_RES (20)..(20): Lys(N-octanoyl)
  MOD_RES (29)..(29): Aib
  c-term amidation
HSEGTFTSDVSSYLEGEAAXEFIAWLVRXR

SEQ ID NO: 584 - protein, 30 aa, Artificial Sequence; identical to SEQ ID NO: 583
  Description of Artificial Sequence: Synthetic modified hGLP-1 peptide
  MOD_RES (20)..(20): Lys(N-tetradecanoyl)
  MOD_RES (29)..(29): Aib
  c-term amidation

SEQ ID NO: 585 - protein, 30 aa, Artificial Sequence; identical to SEQ ID NO: 583
  Description of Artificial Sequence: Synthetic modified hGLP-1 peptide
  MOD_RES (20)..(20): Lys(N-hexadecanoyl)
  MOD_RES (29)..(29): Aib
  c-term amidation

SEQ ID NO: 586 - protein, 30 aa, Artificial Sequence; identical to SEQ ID NO: 525
  Description of Artificial Sequence: Synthetic modified hGLP-1 peptide
  MOD_RES (28)..(28): Lys(N-octanoyl)
  MOD_RES (29)..(29): Aib
  c-term amidation

SEQ ID NO: 587 - protein, 30 aa, Artificial Sequence; identical to SEQ ID NO: 526
  Description of Artificial Sequence: Synthetic modified hGLP-1 peptide
  MOD_RES (26)..(26): A6c
  MOD_RES (28)..(28): Lys(N-octanoyl)
  MOD_RES (29)..(29): Aib
  c-term amidation

SEQ ID NO: 588 - protein, 30 aa, Artificial Sequence
  Description of Artificial Sequence: Synthetic modified hGLP-1 peptide
  MOD_RES (28)..(28): Lys(N-octanoyl)
  MOD_RES (29)..(29): Aib
  c-term amidation
HSEGTFTSDVSSYLEGEAAREFIAWLVXXR

SEQ ID NO: 589 - protein, 30 aa, Artificial Sequence; identical to SEQ ID NO: 588
  Description of Artificial Sequence: Synthetic modified hGLP-1 peptide
  MOD_RES (28)..(28): Lys(N-tetradecanoyl)
  MOD_RES (29)..(29): Aib
  c-term amidation

SEQ ID NO: 590 - protein, 30 aa, Artificial Sequence; identical to SEQ ID NO: 588
  Description of Artificial Sequence: Synthetic modified hGLP-1 peptide
  MOD_RES (28)..(28): Lys(N-hexadecanoyl)
  MOD_RES (29)..(29): Aib
  c-term amidation

SEQ ID NO: 591 - protein, 30 aa, Artificial Sequence
  Description of Artificial Sequence: Synthetic modified hGLP-1 peptide
  MOD_RES (29)..(29): Aib
  MOD_RES (30)..(30): Lys(N-octanoyl)
  c-term amidation
HSEGTFTSDVSSYLEGEAAKEFIAWLVKXX

SEQ ID NO: 592 - protein, 30 aa, Artificial Sequence; identical to SEQ ID NO: 591
  Description of Artificial Sequence: Synthetic modified hGLP-1 peptide
  MOD_RES (29)..(29): Aib
  MOD_RES (30)..(30): Lys(N-tetradecanoyl)
  c-term amidation

SEQ ID NO: 593 - protein, 30 aa, Artificial Sequence; identical to SEQ ID NO: 591
  Description of Artificial Sequence: Synthetic modified hGLP-1 peptide
  MOD_RES (29)..(29): Aib
  MOD_RES (30)..(30): Lys(N-hexadecanoyl)
  c-term amidation

SEQ ID NO: 594 - protein, 30 aa, Artificial Sequence
  Description of Artificial Sequence: Synthetic modified hGLP-1 peptide
  MOD_RES (29)..(29): Aib
  MOD_RES (30)..(30): Lys(N-octanoyl)
  c-term amidation
HSEGTFTSDVSSYLEGEAAREFIAWLVRXX

SEQ ID NO: 595 - protein, 30 aa, Artificial Sequence; identical to SEQ ID NO: 594
  Description of Artificial Sequence: Synthetic modified hGLP-1 peptide
  MOD_RES (29)..(29): Aib
  MOD_RES (30)..(30): Lys(N-tetradecanoyl)
  c-term amidation

SEQ ID NO: 596 - protein, 30 aa, Artificial Sequence; identical to SEQ ID NO: 594
  Description of Artificial Sequence: Synthetic modified hGLP-1 peptide
  MOD_RES (29)..(29): Aib
  MOD_RES (30)..(30): Lys(N-hexadecanoyl)
  c-term amidation

SEQ ID NO: 597 - protein, 30 aa, Artificial Sequence
  Description of Artificial Sequence: Synthetic modified hGLP-1 peptide
  MOD_RES (20)..(20): Lys(N-octanoyl)
  MOD_RES (24)..(24): Aib
  MOD_RES (29)..(29): Aib
  c-term amidation
HSEGTFTSDVSSYLEGQAAXEFIXWLVRXR

SEQ ID NO: 598 - protein, 30 aa, Artificial Sequence; identical to SEQ ID NO: 597
  Description of Artificial Sequence: Synthetic modified hGLP-1 peptide
  MOD_RES (20)..(20): Lys(N-tetradecanoyl)
  MOD_RES (24)..(24): Aib
  MOD_RES (29)..(29): Aib
  c-term amidation

SEQ ID NO: 599 - protein, 30 aa, Artificial Sequence; identical to SEQ ID NO: 597
  Description of Artificial Sequence: Synthetic modified hGLP-1 peptide
  MOD_RES (20)..(20): Lys(N-hexadecanoyl)
  MOD_RES (24)..(24): Aib
  MOD_RES (29)..(29): Aib
  c-term amidation

SEQ ID NO: 600 - protein, 30 aa, Artificial Sequence
  Description of Artificial Sequence: Synthetic modified hGLP-1 peptide
  MOD_RES (24)..(24): Aib
  MOD_RES (28)..(28): Lys(N-octanoyl)
  MOD_RES (29)..(29): Aib
  c-term amidation
HSEGTFTSDVSSYLEGQAAREFIXWLVXXR

SEQ ID NO: 601 - protein, 30 aa, Artificial Sequence; identical to SEQ ID NO: 600
  Description of Artificial Sequence: Synthetic modified hGLP-1 peptide
  MOD_RES (24)..(24): Aib
  MOD_RES (28)..(28): Lys(N-tetradecanoyl)
  MOD_RES (29)..(29): Aib
  c-term amidation

SEQ ID NO: 602 - protein, 30 aa, Artificial Sequence; identical to SEQ ID NO: 600
  Description of Artificial Sequence: Synthetic modified hGLP-1 peptide
  MOD_RES (24)..(24): Aib
  MOD_RES (28)..(28): Lys(N-hexadecanoyl)
  MOD_RES (29)..(29): Aib
  c-term amidation

SEQ ID NO: 603 - protein, 30 aa, Artificial Sequence
  Description of Artificial Sequence: Synthetic modified hGLP-1 peptide
  MOD_RES (24)..(24): Aib
  MOD_RES (29)..(29): Aib
  MOD_RES (30)..(30): Lys(N-octanoyl)
  c-term amidation
HSEGTFTSDVSSYLEGQAAREFIXWLVRXX

SEQ ID NO: 604 - protein, 30 aa, Artificial Sequence; identical to SEQ ID NO: 603
  Description of Artificial Sequence: Synthetic modified hGLP-1 peptide
  MOD_RES (24)..(24): Aib
  MOD_RES (29)..(29): Aib
  MOD_RES (30)..(30): Lys(N-tetradecanoyl)
  c-term amidation

SEQ ID NO: 605 - protein, 30 aa, Artificial Sequence; identical to SEQ ID NO: 603
  Description of Artificial Sequence: Synthetic modified hGLP-1 peptide
  MOD_RES (24)..(24): Aib
  MOD_RES (29)..(29): Aib
  MOD_RES (30)..(30): Lys(N-hexadecanoyl)
  c-term amidation

SEQ ID NO: 606 - protein, 30 aa, Artificial Sequence
  Description of Artificial Sequence: Synthetic modified hGLP-1 peptide
  MOD_RES (26)..(26): A6c
  MOD_RES (29)..(29): Aib
  MOD_RES (30)..(30): Lys(N-octanoyl)
  c-term amidation
HSEGTFTSDVSSYLEGEAAKEFIAWXVKXX

SEQ ID NO: 607 - protein, 30 aa, Artificial Sequence; identical to SEQ ID NO: 606
  Description of Artificial Sequence: Synthetic modified hGLP-1 peptide
  MOD_RES (26)..(26): A6c
  MOD_RES (29)..(29): Aib
  MOD_RES (30)..(30): Lys(N-tetradecanoyl)
  c-term amidation

SEQ ID NO: 608 - protein, 30 aa, Artificial Sequence; identical to SEQ ID NO: 606
  Description of Artificial Sequence: Synthetic modified hGLP-1 peptide
  MOD_RES (26)..(26): A6c
  MOD_RES (29)..(29): Aib
  MOD_RES (30)..(30): Lys(N-hexadecanoyl)
  c-term amidation

SEQ ID NO: 609 - protein, 30 aa, Artificial Sequence
  Description of Artificial Sequence: Synthetic modified hGLP-1 peptide
  MOD_RES (26)..(26): A6c
  MOD_RES (29)..(29): Aib
  MOD_RES (30)..(30): Lys(N-octanoyl)
  c-term amidation
HSEGTFTSDVSSYLEGEAAREFIAWXVRXX

SEQ ID NO: 610 - protein, 30 aa, Artificial Sequence; identical to SEQ ID NO: 609
  Description of Artificial Sequence: Synthetic modified hGLP-1 peptide
  MOD_RES (26)..(26): A6c
  MOD_RES (29)..(29): Aib
  MOD_RES (30)..(30): Lys(N-tetradecanoyl)
  c-term amidation

SEQ ID NO: 611 - protein, 30 aa, Artificial Sequence; identical to SEQ ID NO: 609
  Description of Artificial Sequence: Synthetic modified hGLP-1 peptide
  MOD_RES (26)..(26): A6c
  MOD_RES (29)..(29): Aib
  MOD_RES (30)..(30): Lys(N-hexadecanoyl)
  c-term amidation

SEQ ID NO: 612 - protein, 30 aa, Artificial Sequence
  Description of Artificial Sequence: Synthetic modified hGLP-1 peptide
  MOD_RES (18)..(18): Aib
  MOD_RES (26)..(26): A6c
  MOD_RES (29)..(29): Aib
  MOD_RES (30)..(30): Lys(N-octanoyl)
  c-term amidation
HSEGTFTSDVSSYLEGEXAREFIAWXVRXX

SEQ ID NO: 613 - protein, 30 aa, Artificial Sequence; identical to SEQ ID NO: 612
  Description of Artificial Sequence: Synthetic modified hGLP-1 peptide
  MOD_RES (18)..(18): Aib
  MOD_RES (26)..(26): A6c
  MOD_RES (29)..(29): Aib
  MOD_RES (30)..(30): Lys(N-tetradecanoyl)
  c-term amidation

SEQ ID NO: 614 - protein, 30 aa, Artificial Sequence; identical to SEQ ID NO: 612
  Description of Artificial Sequence: Synthetic modified hGLP-1 peptide
  MOD_RES (18)..(18): Aib
  MOD_RES (26)..(26): A6c
  MOD_RES (29)..(29): Aib
  MOD_RES (30)..(30): Lys(N-hexadecanoyl)
  c-term amidation

SEQ ID NO: 615 - protein, 30 aa, Artificial Sequence
  Description of Artificial Sequence: Synthetic modified hGLP-1 peptide
  MOD_RES (18)..(18): Aib
  MOD_RES (24)..(24): Aib
  MOD_RES (26)..(26): A6c
  MOD_RES (29)..(29): Aib
  MOD_RES (30)..(30): Lys(N-octanoyl)
  c-term amidation
HSEGTFTSDVSSYLEGEXAREFIXWXVRXX

SEQ ID NO: 616 - protein, 30 aa, Artificial Sequence; identical to SEQ ID NO: 615
  Description of Artificial Sequence: Synthetic modified hGLP-1 peptide
  MOD_RES (18)..(18): Aib
  MOD_RES (24)..(24): Aib
  MOD_RES (26)..(26): A6c
  MOD_RES (29)..(29): Aib
  MOD_RES (30)..(30): Lys(N-tetradecanoyl)
  c-term amidation

SEQ ID NO: 617 - protein, 30 aa, Artificial Sequence; identical to SEQ ID NO: 615
  Description of Artificial Sequence: Synthetic modified hGLP-1 peptide
  MOD_RES (18)..(18): Aib
  MOD_RES (24)..(24): Aib
  MOD_RES (26)..(26): A6c
  MOD_RES (29)..(29): Aib
  MOD_RES (30)..(30): Lys(N-hexadecanoyl)
  c-term amidation

SEQ ID NO: 618 - protein, 30 aa, Artificial Sequence; identical to SEQ ID NO: 385
  Description of Artificial Sequence: Synthetic modified hGLP-1 peptide
  MOD_RES (1)..(1): N-HEPES-His
  MOD_RES (29)..(29): Beta-Ala
  c-term amidation

SEQ ID NO: 619 - protein, 30 aa, Artificial Sequence; identical to SEQ ID NO: 385
  Description of Artificial Sequence: Synthetic modified hGLP-1 peptide
  MOD_RES (1)..(1): N-HEPA-His
  MOD_RES (29)..(29): Beta-Ala
  c-term amidation

SEQ ID NO: 620 - protein, 30 aa, Artificial Sequence; identical to SEQ ID NO: 385
  Description of Artificial Sequence: Synthetic modified hGLP-1 peptide
  MOD_RES (1)..(1): N-tetradecanoyl-His
  MOD_RES (29)..(29): Aib
  c-term amidation

SEQ ID NO: 621 - protein, 30 aa, Artificial Sequence; identical to SEQ ID NO: 385
  Description of Artificial Sequence: Synthetic modified hGLP-1 peptide
  MOD_RES (1)..(1): N-tetradecanoyl-His
  MOD_RES (29)..(29): Beta-Ala
  c-term amidation

SEQ ID NO: 622 - protein, 30 aa, Artificial Sequence; identical to SEQ ID NO: 387
  Description of Artificial Sequence: Synthetic modified hGLP-1 peptide
  MOD_RES (1)..(1): N-tetradecanoyl-His
  MOD_RES (29)..(29): Aib
  c-term amidation

SEQ ID NO: 623 - protein, 30 aa, Artificial Sequence; identical to SEQ ID NO: 387
  Description of Artificial Sequence: Synthetic modified hGLP-1 peptide
  MOD_RES (1)..(1): N-tetradecanoyl-His
  MOD_RES (29)..(29): Beta-Ala
  c-term amidation

SEQ ID NO: 624 - protein, 30 aa, Artificial Sequence
  Description of Artificial Sequence: Synthetic modified hGLP-1 peptide
  MOD_RES (1)..(1): N-tetradecanoyl-His
  MOD_RES (29)..(29): Aib
  c-term amidation
XSEGTFTSDVSSYLEGQARREFIAWLVRXR

SEQ ID NO: 625 - protein, 30 aa, Artificial Sequence; identical to SEQ ID NO: 624
  Description of Artificial Sequence: Synthetic modified hGLP-1 peptide
  MOD_RES (1)..(1): N-tetradecanoyl-His
  MOD_RES (29)..(29): Beta-Ala
  c-term amidation

SEQ ID NO: 626 - protein, 30 aa, Artificial Sequence; identical to SEQ ID NO: 467
  Description of Artificial Sequence: Synthetic modified hGLP-1 peptide
  MOD_RES (20)..(20): Lys(N-octanesulfonyl)
  MOD_RES (29)..(29): Aib
  c-term amidation

SEQ ID NO: 627 - protein, 30 aa, Artificial Sequence; identical to SEQ ID NO: 467
  Description of Artificial Sequence: Synthetic modified hGLP-1 peptide
  MOD_RES (20)..(20): Lys(N-dodecanesulfonyl)
  MOD_RES (29)..(29): Aib
  c-term amidation

SEQ ID NO: 628 - protein, 30 aa, Artificial Sequence; identical to SEQ ID NO: 467
  Description of Artificial Sequence: Synthetic modified hGLP-1 peptide
  MOD_RES (20)..(20): Lys(N-hexadecanesulfonyl)
  MOD_RES (29)..(29): Aib
  c-term amidation

SEQ ID NO: 629 - protein, 30 aa, Artificial Sequence; identical to SEQ ID NO: 485
  Description of Artificial Sequence: Synthetic modified hGLP-1 peptide
  MOD_RES (28)..(28): Lys(N-octanesulfonyl)
  MOD_RES (29)..(29): Aib
  c-term amidation

SEQ ID NO: 630 - protein, 30 aa, Artificial Sequence; identical to SEQ ID NO: 485
  Description of Artificial Sequence: Synthetic modified hGLP-1 peptide
  MOD_RES (28)..(28): Lys(N-dodecanesulfonyl)
  MOD_RES (29)..(29): Aib
  c-term amidation

SEQ ID NO: 631 - protein, 30 aa, Artificial Sequence; identical to SEQ ID NO: 485
  Description of Artificial Sequence: Synthetic modified hGLP-1 peptide
  MOD_RES (28)..(28): Lys(N-hexadecanesulfonyl)
  MOD_RES (29)..(29): Aib
  c-term amidation

SEQ ID NO: 632 - protein, 30 aa, Artificial Sequence; identical to SEQ ID NO: 447
  Description of Artificial Sequence: Synthetic modified hGLP-1 peptide
  MOD_RES (29)..(29): Aib
  MOD_RES (30)..(30): Lys(N-octanesulfonyl)
  c-term amidation

SEQ ID NO: 633 - protein, 30 aa, Artificial Sequence; identical to SEQ ID NO: 447
  Description of Artificial Sequence: Synthetic modified hGLP-1 peptide
  MOD_RES (29)..(29): Aib
  MOD_RES (30)..(30): Lys(N-hexadecanesulfonyl)
  c-term amidation

SEQ ID NO: 634 - protein, 30 aa, Artificial Sequence; identical to SEQ ID NO: 467
  Description of Artificial Sequence: Synthetic modified hGLP-1 peptide
  MOD_RES (20)..(20): Asp(1-(4-decylpiperazine))
  MOD_RES (29)..(29): Aib
  c-term amidation

SEQ ID NO: 635 - protein, 30 aa, Artificial Sequence; identical to SEQ ID NO: 467
  Description of Artificial Sequence: Synthetic modified hGLP-1 peptide
  MOD_RES (20)..(20): Asp(1-(4-dodecylpiperazine))
  MOD_RES (29)..(29): Aib
  c-term amidation

SEQ ID NO: 636 - protein, 30 aa, Artificial Sequence; identical to SEQ ID NO: 467
  Description of Artificial Sequence: Synthetic modified hGLP-1 peptide
  MOD_RES (20)..(20): Asp(1-(4-tetradecylpiperazine))
  MOD_RES (29)..(29): Aib
  c-term amidation

SEQ ID NO: 637 - protein, 30 aa, Artificial Sequence; identical to SEQ ID NO: 467
  Description of Artificial Sequence: Synthetic modified hGLP-1 peptide
  MOD_RES (20)..(20): Asp(1-(4-hexadecylpiperazine))
  MOD_RES (29)..(29): Aib
  c-term amidation

SEQ ID NO: 638 - protein, 30 aa, Artificial Sequence; identical to SEQ ID NO: 485
  Description of Artificial Sequence: Synthetic modified hGLP-1 peptide
  MOD_RES (28)..(28): Asp(1-(4-decylpiperazine))
  MOD_RES (29)..(29): Aib
  c-term amidation

SEQ ID NO: 639 - protein, 30 aa, Artificial Sequence; identical to SEQ ID NO: 485
  Description of Artificial Sequence: Synthetic modified hGLP-1 peptide
  MOD_RES (28)..(28): Asp(1-(4-dodecylpiperazine))
  MOD_RES (29)..(29): Aib
  c-term amidation

SEQ ID NO: 640 - protein, 30 aa, Artificial Sequence; identical to SEQ ID NO: 485
  Description of Artificial Sequence: Synthetic modified hGLP-1 peptide
  MOD_RES (28)..(28): Asp(1-(4-tetradecylpiperazine))
  MOD_RES (29)..(29): Aib
  c-term amidation

SEQ ID NO: 641 - protein, 30 aa, Artificial Sequence; identical to SEQ ID NO: 485
  Description of Artificial Sequence: Synthetic modified hGLP-1 peptide
  MOD_RES (28)..(28): Asp(1-(4-hexadecylpiperazine))
  MOD_RES (29)..(29): Aib
  c-term amidation

SEQ ID NO: 642 - protein, 30 aa, Artificial Sequence; identical to SEQ ID NO: 447
  Description of Artificial Sequence: Synthetic modified hGLP-1 peptide
  MOD_RES (29)..(29): Aib
  MOD_RES (30)..(30): Asp(1-(4-decylpiperazine))
  c-term amidation

SEQ ID NO: 643 - protein, 30 aa, Artificial Sequence; identical to SEQ ID NO: 447
  Description of Artificial Sequence: Synthetic modified hGLP-1 peptide
  MOD_RES (29)..(29): Aib
  MOD_RES (30)..(30): Asp(1-(4-dodecylpiperazine))
  c-term amidation

SEQ ID NO: 644 - protein, 30 aa, Artificial Sequence; identical to SEQ ID NO: 447
  Description of Artificial Sequence: Synthetic modified hGLP-1 peptide
  MOD_RES (29)..(29): Aib
  MOD_RES (30)..(30): Asp(1-(4-hexadecylpiperazine))
  c-term amidation

SEQ ID NO: 645 - protein, 32 aa, Artificial Sequence; identical to SEQ ID NO: 453
  Description of Artificial Sequence: Synthetic modified hGLP-1 peptide
  MOD_RES (29)..(29): Aib
  MOD_RES (32)..(32): Asp(1-(4-decylpiperazine))
  c-term amidation

SEQ ID NO: 646 - protein, 32 aa, Artificial Sequence; identical to SEQ ID NO: 453
  Description of Artificial Sequence: Synthetic modified hGLP-1 peptide
  MOD_RES (29)..(29): Aib
  MOD_RES (32)..(32): Asp(1-(4-dodecylpiperazine))
  c-term amidation

SEQ ID NO: 647 - protein, 32 aa, Artificial Sequence; identical to SEQ ID NO: 453
  Description of Artificial Sequence: Synthetic modified hGLP-1 peptide
  MOD_RES (29)..(29): Aib
  MOD_RES (32)..(32): Asp(1-(4-tetradecylpiperazine))
  c-term amidation

SEQ ID NO: 648 - protein, 32 aa, Artificial Sequence; identical to SEQ ID NO: 453
  Description of Artificial Sequence: Synthetic modified hGLP-1 peptide
  MOD_RES (29)..(29): Aib
  MOD_RES (32)..(32): Asp(1-(4-hexadecylpiperazine))
  c-term amidation

SEQ ID NO: 649 - protein, 32 aa, Artificial Sequence; identical to SEQ ID NO: 451
  Description of Artificial Sequence: Synthetic modified hGLP-1 peptide
  MOD_RES (29)..(29): Aib
  MOD_RES (31)..(31): Aib
  MOD_RES (32)..(32): Asp(1-(4-decylpiperazine)
  c-term amidation

SEQ ID NO: 650 - protein, 32 aa, Artificial Sequence; identical to SEQ ID NO: 451
  Description of Artificial Sequence: Synthetic modified hGLP-1 peptide
  MOD_RES (29)..(29): Aib
  MOD_RES (31)..(31): Aib
  MOD_RES (32)..(32): Asp(1-(4-dodecylpiperazine))
  c-term amidation

SEQ ID NO: 651 - protein, 32 aa, Artificial Sequence; identical to SEQ ID NO: 451
  Description of Artificial Sequence: Synthetic modified hGLP-1 peptide
  MOD_RES (29)..(29): Aib
  MOD_RES (31)..(31): Aib
  MOD_RES (32)..(32): Asp(1-(4-tetradecylpiperazine))
  c-term amidation

SEQ ID NO: 652 - protein, 32 aa, Artificial Sequence; identical to SEQ ID NO: 451
  Description of Artificial Sequence: Synthetic modified hGLP-1 peptide
  MOD_RES (29)..(29): Aib
  MOD_RES (31)..(31): Aib
  MOD_RES (32)..(32): Asp(1-(4-hexadecylpiperazine))
  c-term amidation

SEQ ID NO: 653 - protein, 30 aa, Artificial Sequence; identical to SEQ ID NO: 474
  Description of Artificial Sequence: Synthetic modified hGLP-1 peptide
  MOD_RES (20)..(20): Asp(1-(4-decylpiperazine))
  MOD_RES (29)..(29): Aib
  c-term amidation

SEQ ID NO: 654 - protein, 30 aa, Artificial Sequence; identical to SEQ ID NO: 474
  Description of Artificial Sequence: Synthetic modified hGLP-1 peptide
  MOD_RES (20)..(20): Asp(1-(4-dodecylpiperazine))
  MOD_RES (29)..(29): Aib
  c-term amidation

SEQ ID NO: 655 - protein, 30 aa, Artificial Sequence; identical to SEQ ID NO: 474
  Description of Artificial Sequence: Synthetic modified hGLP-1 peptide
  MOD_RES (20)..(20): Asp(1-(4-tetradecylpiperazine))
  MOD_RES (29)..(29): Aib
  c-term amidation

SEQ ID NO: 656 - protein, 30 aa, Artificial Sequence; identical to SEQ ID NO: 474
  Description of Artificial Sequence: Synthetic modified hGLP-1 peptide
  MOD_RES (20)..(20): Asp(1-(4-hexadecylpiperazine))
  MOD_RES (29)..(29): Aib
  c-term amidation

SEQ ID NO: 657 - protein, 30 aa, Artificial Sequence; identical to SEQ ID NO: 488
  Description of Artificial Sequence: Synthetic modified hGLP-1 peptide
  MOD_RES (28)..(28): Asp(1-(4-decylpiperazine))
  MOD_RES (29)..(29): Aib
  c-term amidation

SEQ ID NO: 658 - protein, 30 aa, Artificial Sequence; identical to SEQ ID NO: 488
  Description of Artificial Sequence: Synthetic modified hGLP-1 peptide
  MOD_RES (28)..(28): Asp(1-(4-dodecylpiperazine)
  MOD_RES (29)..(29): Aib
  c-term amidation

SEQ ID NO: 659 - protein, 30 aa, Artificial Sequence; identical to SEQ ID NO: 488
  Description of Artificial Sequence: Synthetic modified hGLP-1 peptide
  MOD_RES (28)..(28): Asp(1-(4-tetradecylpiperazine))
  MOD_RES (29)..(29): Aib
  c-term amidation

SEQ ID NO: 660 - protein, 30 aa, Artificial Sequence; identical to SEQ ID NO: 488
  Description of Artificial Sequence: Synthetic modified hGLP-1 peptide
  MOD_RES (28)..(28): Asp(1-(4-hexadecylpiperazine))
  MOD_RES (29)..(29): Aib
  c-term amidation

SEQ ID NO: 661 - protein, 30 aa, Artificial Sequence; identical to SEQ ID NO: 517
  Description of Artificial Sequence: Synthetic modified hGLP-1 peptide
  MOD_RES (29)..(29): Aib
  MOD_RES (30)..(30): Asp(1-(4-decylpiperazine))
  c-term amidation

SEQ ID NO: 662 - protein, 30 aa, Artificial Sequence; identical to SEQ ID NO: 517
  Description of Artificial Sequence: Synthetic modified hGLP-1 peptide
  MOD_RES (29)..(29): Aib
  MOD_RES (30)..(30): Asp(1-(4-dodecylpiperazine))
  c-term amidation

SEQ ID NO: 663 - protein, 30 aa, Artificial Sequence; identical to SEQ ID NO: 517
  Description of Artificial Sequence: Synthetic modified hGLP-1 peptide
  MOD_RES (29)..(29): Aib
  MOD_RES (30)..(30): Asp(1-(4-tetradecylpiperazine))
  c-term amidation

SEQ ID NO: 664 - protein, 30 aa, Artificial Sequence; identical to SEQ ID NO: 517
  Description of Artificial Sequence: Synthetic modified hGLP-1 peptide
  MOD_RES (29)..(29): Aib
  MOD_RES (30)..(30): Asp(1-(4-hexadecylpiperazine))
  c-term amidation

SEQ ID NO: 665 - protein, 32 aa, Artificial Sequence
  Description of Artificial Sequence: Synthetic modified hGLP-1 peptide
  MOD_RES (29)..(29): Aib
  MOD_RES (32)..(32): Asp(1-(4-decylpiperazine))
  c-term amidation
HSEGTFTSDVSSYLEGQARREFIAWLVRXRGX

SEQ ID NO: 666 - protein, 32 aa, Artificial Sequence; identical to SEQ ID NO: 665
  Description of Artificial Sequence: Synthetic modified hGLP-1 peptide
  MOD_RES (29)..(29): Aib
  MOD_RES (32)..(32): Asp(1-(4-dodecylpiperazine))
  c-term amidation

SEQ ID NO: 667 - protein, 32 aa, Artificial Sequence; identical to SEQ ID NO: 665
  Description of Artificial Sequence: Synthetic modified hGLP-1 peptide
  MOD_RES (29)..(29): Aib
  MOD_RES (32)..(32): Asp(1-(4-tetradecylpiperazine))
  c-term amidation

SEQ ID NO: 668 - protein, 32 aa, Artificial Sequence; identical to SEQ ID NO: 665
  Description of Artificial Sequence: Synthetic modified hGLP-1 peptide
  MOD_RES (29)..(29): Aib
  MOD_RES (32)..(32): Asp(1-(4-hexadecylpiperazine))
  c-term amidation

SEQ ID NO: 669 - protein, 32 aa, Artificial Sequence; identical to SEQ ID NO: 507
  Description of Artificial Sequence: Synthetic modified hGLP-1 peptide
  MOD_RES (29)..(29): Aib
  MOD_RES (31)..(31): Aib
  MOD_RES (32)..(32): Asp(1-(4-decylpiperazine))
  c-term amidation

SEQ ID NO: 670 - protein, 32 aa, Artificial Sequence; identical to SEQ ID NO: 507
  Description of Artificial Sequence: Synthetic modified hGLP-1 peptide
  MOD_RES (29)..(29): Aib
  MOD_RES (31)..(31): Aib
  MOD_RES (32)..(32): Asp(1-(4-dodecylpiperazine))
  c-term amidation

SEQ ID NO: 671 - protein, 32 aa, Artificial Sequence; identical to SEQ ID NO: 507
  Description of Artificial Sequence: Synthetic modified hGLP-1 peptide
  MOD_RES (29)..(29): Aib
  MOD_RES (31)..(31): Aib
  MOD_RES (32)..(32): Asp(1-(4-tetradecylpiperazine))
  c-term amidation

SEQ ID NO: 672 - protein, 32 aa, Artificial Sequence; identical to SEQ ID NO: 507
  Description of Artificial Sequence: Synthetic modified hGLP-1 peptide
  MOD_RES (29)..(29): Aib
  MOD_RES (31)..(31): Aib
  MOD_RES (32)..(32): Asp(1-(4-hexadecylpiperazine))
  c-term amidation

SEQ ID NO: 673 - protein, 30 aa, Artificial Sequence; identical to SEQ ID NO: 447
  Description of Artificial Sequence: Synthetic modified hGLP-1 peptide
  MOD_RES (29)..(29): Aib
  MOD_RES (30)..(30): Glu(1-dodecylamino)
  c-term amidation

SEQ ID NO: 674 - protein, 30 aa, Artificial Sequence; identical to SEQ ID NO: 467
  Description of Artificial Sequence: Synthetic modified hGLP-1 peptide
  MOD_RES (20)..(20): Glu(1-dodecylamino)
  MOD_RES (29)..(29): Aib
  c-term amidation

SEQ ID NO: 675 - protein, 30 aa, Artificial Sequence; identical to SEQ ID NO: 485
  Description of Artificial Sequence: Synthetic modified hGLP-1 peptide
  MOD_RES (28)..(28): Glu(1-dodecylamino)
  MOD_RES (29)..(29): Aib
  c-term amidation

SEQ ID NO: 676 - protein, 32 aa, Artificial Sequence; identical to SEQ ID NO: 451
  Description of Artificial Sequence: Synthetic modified hGLP-1 peptide
  MOD_RES (29)..(29): Aib
  MOD_RES (31)..(31): Aib
  MOD_RES (32)..(32): Glu(1-dodecylamino)
  c-term amidation

SEQ ID NO: 677 - protein, 30 aa, Artificial Sequence; identical to SEQ ID NO: 467
  Description of Artificial Sequence: Synthetic modified hGLP-1 peptide
  MOD_RES (20)..(20): Lys(N-(2-(4-decyl-1-piperazine)-acetyl))
  MOD_RES (29)..(29): Aib
  c-term amidation

SEQ ID NO: 678 - protein, 30 aa, Artificial Sequence; identical to SEQ ID NO: 467
  Description of Artificial Sequence: Synthetic modified hGLP-1 peptide
  MOD_RES (20)..(20): Lys(N-(2-(4-dodecyl-1-piperazine)-acetyl))
  MOD_RES (29)..(29): Aib
  c-term amidation

SEQ ID NO: 679 - protein, 30 aa, Artificial Sequence; identical to SEQ ID NO: 467
  Description of Artificial Sequence: Synthetic modified hGLP-1 peptide
  MOD_RES (20)..(20): Lys(N-(2-(4-tetradecyl-1-piperazine)-acetyl))
  MOD_RES (29)..(29): Aib
  c-term amidation

SEQ ID NO: 680 - protein, 30 aa, Artificial Sequence; identical to SEQ ID NO: 467
  Description of Artificial Sequence: Synthetic modified hGLP-1 peptide
  MOD_RES (20)..(20): Lys(N-(2-(4-hexadecyl-1-piperazine)-acetyl))
  MOD_RES (29)..(29): Aib
  c-term amidation

SEQ ID NO: 681 - protein, 30 aa, Artificial Sequence; identical to SEQ ID NO: 485
  Description of Artificial Sequence: Synthetic modified hGLP-1 peptide
  MOD_RES (28)..(28): Lys(N-(2-(4-decyl-1-piperazine)-acetyl))
  MOD_RES (29)..(29): Aib
  c-term amidation

SEQ ID NO: 682 - protein, 30 aa, Artificial Sequence; identical to SEQ ID NO: 485
  Description of Artificial Sequence: Synthetic modified hGLP-1 peptide
  MOD_RES (28)..(28): Lys(N-(2-(4-dodecyl-1-piperazine)-acetyl))
  MOD_RES (29)..(29): Aib
  c-term amidation

SEQ ID NO: 683 - protein, 30 aa, Artificial Sequence; identical to SEQ ID NO: 485
  Description of Artificial Sequence: Synthetic modified hGLP-1 peptide
  MOD_RES (28)..(28): Lys(N-(2-(4-tetradecyl-1-piperazine)-acetyl))
  MOD_RES (29)..(29): Aib
  c-term amidation

SEQ ID NO: 684 - protein, 30 aa, Artificial Sequence; identical to SEQ ID NO: 485
  Description of Artificial Sequence: Synthetic modified hGLP-1 peptide
  MOD_RES (28)..(28): Lys(N-(2-(4-hexadecyl-1-piperazine)-acetyl))
  MOD_RES (29)..(29): Aib
  c-term amidation

SEQ ID NO: 685 - protein, 30 aa, Artificial Sequence; identical to SEQ ID NO: 447
  Description of Artificial Sequence: Synthetic modified hGLP-1 peptide
  MOD_RES (29)..(29): Aib
  MOD_RES (30)..(30): Lys(N-(2-(4-decyl-1-piperazine)-acetyl))
  c-term amidation

SEQ ID NO: 686 - protein, 30 aa, Artificial Sequence; identical to SEQ ID NO: 447
  Description of Artificial Sequence: Synthetic modified hGLP-1 peptide
  MOD_RES (29)..(29): Aib
  MOD_RES (30)..(30): Lys(N-(2-(4-dodecyl-1-piperazine)-acetyl))
  c-term amidation

SEQ ID NO: 687 - protein, 30 aa, Artificial Sequence; identical to SEQ ID NO: 447
  Description of Artificial Sequence: Synthetic modified hGLP-1 peptide
  MOD_RES (29)..(29): Aib
  MOD_RES (30)..(30): Lys(N-(2-(4-hexadecyl-1-piperazine)-acetyl))
  c-term amidation

SEQ ID NO: 688 - protein, 32 aa, Artificial Sequence; identical to SEQ ID NO: 453
  Description of Artificial Sequence: Synthetic modified hGLP-1 peptide
  MOD_RES (29)..(29): Aib
  MOD_RES (32)..(32): Lys(N-(2-(4-decyl-1-piperazine)-acetyl))
  c-term amidation

SEQ ID NO: 689 - protein, 32 aa, Artificial Sequence; identical to SEQ ID NO: 453
  Description of Artificial Sequence: Synthetic modified hGLP-1 peptide
  MOD_RES (29)..(29): Aib
  MOD_RES (32)..(32): Lys(N-(2-(4-dodecyl-1-piperazine)-acetyl))
  c-term amidation

SEQ ID NO: 690 - protein, 32 aa, Artificial Sequence; identical to SEQ ID NO: 453
  Description of Artificial Sequence: Synthetic modified hGLP-1 peptide
  MOD_RES (29)..(29): Aib
  MOD_RES (32)..(32): Lys(N-(2-(4-tetradecyl-1-piperazine)-acetyl))
  c-term amidation

SEQ ID NO: 691 - protein, 32 aa, Artificial Sequence; identical to SEQ ID NO: 453
  Description of Artificial Sequence: Synthetic modified hGLP-1 peptide
  MOD_RES (29)..(29): Aib
  MOD_RES (32)..(32): Lys(N-(2-(4-hexadecyl-1-piperazine)-acetyl))
  c-term amidation

SEQ ID NO: 692 - protein, 32 aa, Artificial Sequence; identical to SEQ ID NO: 451
  Description of Artificial Sequence: Synthetic modified hGLP-1 peptide
  MOD_RES (29)..(29): Aib
  MOD_RES (31)..(31): Aib
  MOD_RES (32)..(32): Lys(N-(2-(4-decyl-1-piperazine)-acetyl))
  c-term amidation

SEQ ID NO: 693 - protein, 32 aa, Artificial Sequence; identical to SEQ ID NO: 451
  Description of Artificial Sequence: Synthetic modified hGLP-1 peptide
  MOD_RES (29)..(29): Aib
  MOD_RES (31)..(31): Aib
  MOD_RES (32)..(32): Lys(N-(2-(4-dodecyl-1-piperazine)-acetyl))
  c-term amidation

SEQ ID NO: 694 - protein, 32 aa, Artificial Sequence; identical to SEQ ID NO: 451
  Description of Artificial Sequence: Synthetic modified hGLP-1 peptide
  MOD_RES (29)..(29): Aib
  MOD_RES (31)..(31): Aib
  MOD_RES (32)..(32): Lys(N-(2-(4-tetradecyl-1-piperazine)-acetyl))
  c-term amidation

SEQ ID NO: 695 - protein, 32 aa, Artificial Sequence; identical to SEQ ID NO: 451
  Description of Artificial Sequence: Synthetic modified hGLP-1 peptide
  MOD_RES (29)..(29): Aib
  MOD_RES (31)..(31): Aib
  MOD_RES (32)..(32): Lys(N-(2-(4-hexadecyl-1-piperazine)-acetyl))
  c-term amidation

SEQ ID NO: 696 - protein, 30 aa, Artificial Sequence; identical to SEQ ID NO: 474
  Description of Artificial Sequence: Synthetic modified hGLP-1 peptide
  MOD_RES (20)..(20): Lys(N-(2-(4-decyl-1-piperazine)-acetyl))
  MOD_RES (29)..(29): Aib
  c-term amidation

SEQ ID NO: 697 - protein, 30 aa, Artificial Sequence; identical to SEQ ID NO: 474
  Description of Artificial Sequence: Synthetic modified hGLP-1 peptide
  MOD_RES (20)..(20): Lys(N-(2-(4-dodecyl-1-piperazine)-acetyl))
  MOD_RES (29)..(29): Aib
  c-term amidation

SEQ ID NO: 698 - protein, 30 aa, Artificial Sequence; identical to SEQ ID NO: 474
  Description of Artificial Sequence: Synthetic modified hGLP-1 peptide
  MOD_RES (20)..(20): Lys(N-(2-(4-tetradecyl-1-piperazine)-acetyl))
  MOD_RES (29)..(29): Aib
  c-term amidation

SEQ ID NO: 699 - protein, 30 aa, Artificial Sequence; identical to SEQ ID NO: 474
  Description of Artificial Sequence: Synthetic modified hGLP-1 peptide
  MOD_RES (20)..(20): Lys(N-(2-(4-hexadecyl-1-piperazine)-acetyl))
  MOD_RES (29)..(29): Aib
  c-term amidation

SEQ ID NO: 700 - protein, 30 aa, Artificial Sequence; identical to SEQ ID NO: 488
  Description of Artificial Sequence: Synthetic modified hGLP-1 peptide
  MOD_RES (28)..(28): Lys(N-(2-(4-decyl-1-piperazine)-acetyl))
  MOD_RES (29)..(29): Aib
  c-term amidation

SEQ ID NO: 701 - protein, 30 aa, Artificial Sequence; identical to SEQ ID NO: 488
  Description of Artificial Sequence: Synthetic modified hGLP-1 peptide
  MOD_RES (28)..(28): Lys(N-(2-(4-dodecyl-1-piperazine)-acetyl))
  MOD_RES (29)..(29): Aib
  c-term amidation

SEQ ID NO: 702 - protein, 30 aa, Artificial Sequence; identical to SEQ ID NO: 488
  Description of Artificial Sequence: Synthetic modified hGLP-1 peptide
  MOD_RES (28)..(28): Lys(N-(2-(4-tetradecyl-1-piperazine)-acetyl))
  MOD_RES (29)..(29): Aib
  c-term amidation

SEQ ID NO: 703 - protein, 30 aa, Artificial Sequence; identical to SEQ ID NO: 488
  Description of Artificial Sequence: Synthetic modified hGLP-1 peptide
  MOD_RES (28)..(28): Lys(N-(2-(4-hexadecyl-1-piperazine)-acetyl))
  MOD_RES (29)..(29): Aib
  c-term amidation

SEQ ID NO: 704 - protein, 30 aa, Artificial Sequence; identical to SEQ ID NO: 517
  Description of Artificial Sequence: Synthetic modified hGLP-1 peptide
  MOD_RES (29)..(29): Aib
  MOD_RES (30)..(30): Lys(N-(2-(4-decyl-1-piperazine)-acetyl))
  c-term amidation

SEQ ID NO: 705 - protein, 30 aa, Artificial Sequence; identical to SEQ ID NO: 517
  Description of Artificial Sequence: Synthetic modified hGLP-1 peptide
  MOD_RES (29)..(29): Aib
  MOD_RES (30)..(30): Lys(N-(2-(4-dodecyl-1-piperazine)-acetyl))
  c-term amidation

SEQ ID NO: 706 - protein, 30 aa, Artificial Sequence; identical to SEQ ID NO: 517
  Description of Artificial Sequence: Synthetic modified hGLP-1 peptide
  MOD_RES (29)..(29): Aib
  MOD_RES (30)..(30): Lys(N-(2-(4-tetradecyl-1-piperazine)-acetyl))
  c-term amidation

SEQ ID NO: 707 - protein, 30 aa, Artificial Sequence; identical to SEQ ID NO: 517
  Description of Artificial Sequence: Synthetic modified hGLP-1 peptide
  MOD_RES (29)..(29): Aib
  MOD_RES (30)..(30): Lys(N-(2-(4-hexadecyl-1-piperazine)-acetyl))
  c-term amidation

SEQ ID NO: 708 - protein, 32 aa, Artificial Sequence; identical to SEQ ID NO: 665
  Description of Artificial Sequence: Synthetic modified hGLP-1 peptide
  MOD_RES (29)..(29): Aib
  MOD_RES (32)..(32): Lys(N-(2-(4-decyl-1-piperazine)-acetyl)))
  c-term amidation

SEQ ID NO: 709 - protein, 32 aa, Artificial Sequence; identical to SEQ ID NO: 665
  Description of Artificial Sequence: Synthetic modified hGLP-1 peptide
  MOD_RES (29)..(29): Aib
  MOD_RES (32)..(32): Lys(N-(2-(4-dodecyl-1-piperazine)-acetyl))
  c-term amidation

SEQ ID NO: 710 - protein, 32 aa, Artificial Sequence; identical to SEQ ID NO: 665
  Description of Artificial Sequence: Synthetic modified hGLP-1 peptide
  MOD_RES (29)..(29): Aib
  MOD_RES (32)..(32): Lys(N-(2-(4-tetradecyl-1-piperazine)-acetyl))
  c-term amidation

SEQ ID NO: 711 - protein, 32 aa, Artificial Sequence; identical to SEQ ID NO: 665
  Description of Artificial Sequence: Synthetic modified hGLP-1 peptide
  MOD_RES (29)..(29): Aib
  MOD_RES (32)..(32): Lys(N-(2-(4-hexadecyl-1-piperazine)-acetyl))
  c-term amidation

SEQ ID NO: 712 - protein, 32 aa, Artificial Sequence; identical to SEQ ID NO: 507
  Description of Artificial Sequence: Synthetic modified hGLP-1 peptide
  MOD_RES (29)..(29): Aib
  MOD_RES (31)..(31): Aib
  MOD_RES (32)..(32): Lys(N-(2-(4-decyl-1-piperazine)-acetyl))
  c-term amidation

SEQ ID NO: 713 - protein, 32 aa, Artificial Sequence; identical to SEQ ID NO: 507
  Description of Artificial Sequence: Synthetic modified hGLP-1 peptide
  MOD_RES (29)..(29): Aib
  MOD_RES (31)..(31): Aib
  MOD_RES (32)..(32): Lys(N-(2-(4-dodecyl-1-piperazine)-acetyl))
  c-term amidation

SEQ ID NO: 714 - protein, 32 aa, Artificial Sequence; identical to SEQ ID NO: 507
  Description of Artificial Sequence: Synthetic modified hGLP-1 peptide
  MOD_RES (29)..(29): Aib
  MOD_RES (31)..(31): Aib
  MOD_RES (32)..(32): Lys(N-(2-(4-tetradecyl-1-piperazine)-acetyl))
  c-term amidation

SEQ ID NO: 715 - protein, 32 aa, Artificial Sequence; identical to SEQ ID NO: 507
  Description of Artificial Sequence: Synthetic modified hGLP-1 peptide
  MOD_RES (29)..(29): Aib
  MOD_RES (31)..(31): Aib
  MOD_RES (32)..(32): Lys(N-(2-(4-hexadecyl-1-piperazine)-acetyl))
  c-term amidation

SEQ ID NO: 716 - protein, 30 aa, Artificial Sequence; identical to SEQ ID NO: 447
  Description of Artificial Sequence: Synthetic modified hGLP-1 peptide
  MOD_RES (29)..(29): Aib
  MOD_RES (30)..(30): Lys(N-decanoyl)

SEQ ID NO: 717 - protein, 30 aa, Artificial Sequence; identical to SEQ ID NO: 514
  Description of Artificial Sequence: Synthetic modified hGLP-1 peptide
  MOD_RES (29)..(29): Aib
  MOD_RES (30)..(30): Lys(N-decanoyl)

SEQ ID NO: 718 - protein, 32 aa, Artificial Sequence; identical to SEQ ID NO: 451
  Description of Artificial Sequence: Synthetic modified hGLP-1 peptide
  MOD_RES (29)..(29): Aib
  MOD_RES (31)..(31): Ava
  MOD_RES (32)..(32): Ado
  c-term amidation

SEQ ID NO: 719 - protein, 33 aa, Artificial Sequence
  Description of Artificial Sequence: Synthetic modified hGLP-1 peptide
  MOD_RES (29)..(29): Aib
  MOD_RES (32)..(32): Ava
  MOD_RES (33)..(33): Ado
  c-term amidation
HSEGTFTSDVSSYLEGQAAREFIAWLVRXRDXX

SEQ ID NO: 720 - protein, 31 aa, Artificial Sequence; identical to SEQ ID NO: 456
  Description of Artificial Sequence: Synthetic modified hGLP-1 peptide
  MOD_RES (29)..(29): Aib
  MOD_RES (31)..(31): Aun
  c-term amidation

SEQ ID NO: 721 - protein, 30 aa, Artificial Sequence
  Description of Artificial Sequence: Synthetic modified hGLP-1 peptide
  MOD_RES (11)..(11): Aib
  MOD_RES (29)..(29): Aib
  c-term amidation
HSEGTFTSDVXSYLEGQAAKEFIAWLVKXR

SEQ ID NO: 722 - protein, 33 aa, Artificial Sequence
  Description of Artificial Sequence: Synthetic modified hGLP-1 peptide
  MOD_RES (29)..(29): Beta-Ala
  MOD_RES (31)..(31): D-Asp
  MOD_RES (32)..(32): Ava
  MOD_RES (33)..(33): Aun
  c-term amidation
HSEGTFTSDVSSYLEGQAAREFIAWLVRXRXXX

SEQ ID NO: 723 - protein, 30 aa, Artificial Sequence
  Description of Artificial Sequence: Synthetic modified hGLP-1 peptide
  MOD_RES (29)..(29): Beta-Ala
  c-term amidation
HSEGTFTSDVSSYLEEEAAKEFIAWLVKXR

SEQ ID NO: 724 - protein, 30 aa, Artificial Sequence
  Description of Artificial Sequence: Synthetic modified hGLP-1 peptide
  MOD_RES (29)..(29): Beta-Ala
  c-term amidation
HSEGTFTSDVSKYLEGQAAKEFIAWLVKXR

SEQ ID NO: 725 - protein, 30 aa, Artificial Sequence
  Description of Artificial Sequence: Synthetic modified hGLP-1 peptide
  MOD_RES (29)..(29): Beta-Ala
  c-term amidation
HSEGTFTSDVSSYLEGQAAKLFIAWLVKXR

SEQ ID NO: 726 - protein, 30 aa, Artificial Sequence
  Description of Artificial Sequence: Synthetic modified hGLP-1 peptide
  MOD_RES (29)..(29): Beta-Ala
  c-term amidation
HSEGTFTSDVSSYLEGQAAKEFIAWLKKXR

SEQ ID NO: 727 - protein, 30 aa, Artificial Sequence
  Description of Artificial Sequence: Synthetic modified hGLP-1 peptide
  MOD_RES (29)..(29): Beta-Ala
  c-term amidation
HSEGTFTSDVSKYLEGQAAKLFIAWLVKXR

SEQ ID NO: 728 - protein, 30 aa, Artificial Sequence
  Description of Artificial Sequence: Synthetic modified hGLP-1 peptide
  MOD_RES (30)..(30): D-Arg
  c-term amidation
HSEGTFTSDVSSYLEGQAAKEFIAWLVKGX

SEQ ID NO: 729 - protein, 31 aa, Artificial Sequence
  Description of Artificial Sequence: Synthetic modified hGLP-1 peptide
  MOD_RES (29)..(29): Beta-Ala
  MOD_RES (31)..(31): D-Arg
  c-term amidation
HSEGTFTSDVSSYLEGQAAKEFIAWLVKXRX

SEQ ID NO: 730 - protein, 30 aa, Artificial Sequence
  Description of Artificial Sequence: Synthetic modified hGLP-1 peptide
  MOD_RES (21)..(21): Aib
  MOD_RES (29)..(29): Beta-Ala
  c-term amidation
HSEGTFTSDVSSYLEGQAAKXFIAWLVKXR

SEQ ID NO: 731 - protein, 32 aa, Artificial Sequence
  Description of Artificial Sequence: Synthetic modified hGLP-1 peptide
  MOD_RES (21)..(21): Aib
  MOD_RES (29)..(29): Beta-Ala
  MOD_RES (31)..(31): Beta-Ala
  c-term amidation
HSEGTFTSDVSSYLEGQAAKXFIAWLVKXRXR

SEQ ID NO: 732 - protein, 33 aa, Artificial Sequence
  Description of Artificial Sequence: Synthetic modified hGLP-1 peptide
  MOD_RES (21)..(21): Aib
  MOD_RES (29)..(29): Beta-Ala
  MOD_RES (31)..(31): Beta-Ala
  c-term amidation
HSEGTFTSDVSSYLEGQAAKXFIAWLVKXRXRR

SEQ ID NO: 733 - protein, 30 aa, Artificial Sequence
  Description of Artificial Sequence: Synthetic modified hGLP-1 peptide
  MOD_RES (29)..(29): Beta-Ala
  c-term amidation
HSEGTFTSDVSKYLEGQAAKKFIAWLVKXR

SEQ ID NO: 734 - protein, 30 aa, Artificial Sequence
  Description of Artificial Sequence: Synthetic modified hGLP-1 peptide
  MOD_RES (29)..(29): Beta-Ala
  c-term amidation
HSEGTFTSDVSSYLEGQAAKKFIAWLVKXR

SEQ ID NO: 735 - protein, 32 aa, Artificial Sequence
  Description of Artificial Sequence: Synthetic modified hGLP-1 peptide
  MOD_RES (29)..(29): Beta-Ala
  c-term amidation
HSEGTFTSDVSSYLEGQAAKEFIAWLVKXRGR

SEQ ID NO: 736 - protein, 30 aa, Artificial Sequence; identical to SEQ ID NO: 443
  Description of Artificial Sequence: Synthetic modified hGLP-1 peptide
  MOD_RES (29)..(29): Beta-Ala
  c-term amidation

SEQ ID NO: 737 - protein, 30 aa, Artificial Sequence; identical to SEQ ID NO: 389
  Description of Artificial Sequence: Synthetic modified hGLP-1 peptide
  MOD_RES (29)..(29): D-Arg
  c-term amidation

SEQ ID NO: 738 - protein, 31 aa, Artificial Sequence
  Description of Artificial Sequence: Synthetic modified hGLP-1 peptide
  MOD_RES (29)..(29): Beta-Ala
  c-term amidation
HSEGTFTSDVSSYLEGQAAKEFIAWLVKXRR

SEQ ID NO: 739 - protein, 30 aa, Artificial Sequence
  Description of Artificial Sequence: Synthetic modified hGLP-1 peptide
  MOD_RES (29)..(29): Beta-Ala
  c-term amidation
HSEGTFTSDVSSYLEGQAAKEFIAFLVKXR

SEQ ID NO: 740 - protein, 30 aa, Artificial Sequence; identical to SEQ ID NO: 739
  Description of Artificial Sequence: Synthetic modified hGLP-1 peptide
  MOD_RES (29)..(29): Aib
  c-term amidation

SEQ ID NO: 741 - protein, 30 aa, Artificial Sequence
  Description of Artificial Sequence: Synthetic modified hGLP-1 peptide
  MOD_RES (25)..(25): 1-Nal or 2-Nal
  MOD_RES (29)..(29): Aib
  c-term amidation
HSEGTFTSDVSSYLEGQAAKEFIAXLVKXR

SEQ ID NO: 742 - protein, 30 aa, Artificial Sequence
  Description of Artificial Sequence: Synthetic modified hGLP-1 peptide
  MOD_RES (22)..(22): 1-Nal or 2-Nal
  MOD_RES (25)..(25): 1-Nal or 2-Nal
  MOD_RES (29)..(29): Aib
  c-term amidation
HSEGTFTSDVSSYLEGQAAKEXIAXLVKXR

SEQ ID NO: 743 - protein, 30 aa, Artificial Sequence
  Description of Artificial Sequence: Synthetic modified hGLP-1 peptide
  MOD_RES (25)..(25): 1-Nal or 2-Nal
  MOD_RES (29)..(29): Aib
  c-term amidation
HSEGTFTSDVSSYLEGQAAREFIAXLVRXR

SEQ ID NO: 744 - protein, 30 aa, Artificial Sequence
  Description of Artificial Sequence: Synthetic modified hGLP-1 peptide
  MOD_RES (29)..(29): Aib
  c-term amidation
HSEGTFTSDVSSYLEGQAAREFIAFLVRXR

SEQ ID NO: 745 - protein, 30 aa, Artificial Sequence
  Description of Artificial Sequence: Synthetic modified hGLP-1 peptide
  MOD_RES (13)..(13): 1-Nal or 2-Nal
  MOD_RES (25)..(25): 1-Nal or 2-Nal
  MOD_RES (29)..(29): Aib
  c-term amidation
HSEGTFTSDVSSXLEGQAAKEFIAXLVKXR

SEQ ID NO: 746 - protein, 30 aa, Artificial Sequence
  Description of Artificial Sequence: Synthetic modified hGLP-1 peptide
  MOD_RES (6)..(6): 1-Nal or 2-Nal
  MOD_RES (25)..(25): 1-Nal or 2-Nal
  MOD_RES (29)..(29): Aib
  c-term amidation
HSEGTXTSDVSSYLEGQAAKEFIAXLVKXR

SEQ ID NO: 747 - protein, 30 aa, Artificial Sequence; identical to SEQ ID NO: 439
  Description of Artificial Sequence: Synthetic modified hGLP-1 peptide
  MOD_RES (29)..(29): Aib
  MOD_RES (30)..(30): Lys(N-decanoyl)
  c-term amidation

SEQ ID NO: 748 - protein, 30 aa, Artificial Sequence; identical to SEQ ID NO: 467
  Description of Artificial Sequence: Synthetic modified hGLP-1 peptide
  MOD_RES (20)..(20): Lys(N-decanoyl)
  MOD_RES (29)..(29): Aib
  c-term amidation

SEQ ID NO: 749 - protein, 30 aa, Artificial Sequence; identical to SEQ ID NO: 447
  Description of Artificial Sequence: Synthetic modified hGLP-1 peptide
  MOD_RES (29)..(29): Aib
  MOD_RES (30)..(30): Lys(N-dodecanoyl)
  c-term amidation

SEQ ID NO: 750 - protein, 31 aa, Artificial Sequence; identical to SEQ ID NO: 729
  Description of Artificial Sequence: Synthetic modified hGLP-1 peptide
  MOD_RES (29)..(29): Beta-Ala
  MOD_RES (31)..(31): Ser(O-decanoyl)
  c-term amidation

SEQ ID NO: 751 - protein, 33 aa, Artificial Sequence
  Description of Artificial Sequence: Synthetic modified hGLP-1 peptide
  MOD_RES (21)..(21): Aib
  MOD_RES (29)..(29): Beta-Ala
  MOD_RES (31)..(31): Beta-Ala
  MOD_RES (33)..(33): Lys(N-octanoyl)
  c-term amidation
HSEGTFTSDVSSYLEGQAAKXFIAWLVKXRXRX

SEQ ID NO: 752 - protein, 31 aa, Artificial Sequence; identical to SEQ ID NO: 456
  Description of Artificial Sequence: Synthetic modified hGLP-1 peptide
  MOD_RES (29)..(29): Beta-Ala
  MOD_RES (31)..(31): Lys(N-octanoyl)
  c-term amidation

SEQ ID NO: 753 - protein, 31 aa, Artificial Sequence; identical to SEQ ID NO: 456
  Description of Artificial Sequence: Synthetic modified hGLP-1 peptide
  MOD_RES (29)..(29): Beta-Ala
  MOD_RES (31)..(31): Lys(N-decanoyl)
  c-term amidation

SEQ ID NO: 754 - protein, 31 aa, Artificial Sequence; identical to SEQ ID NO: 456
  Description of Artificial Sequence: Synthetic modified hGLP-1 peptide
  MOD_RES (29)..(29): Beta-Ala
  MOD_RES (31)..(31): Lys(N-tetradecanoyl)
  c-term amidation

SEQ ID NO: 755 - protein, 31 aa, Artificial Sequence; identical to SEQ ID NO: 456
  Description of Artificial Sequence: Synthetic modified hGLP-1 peptide
  MOD_RES (29)..(29): Beta-Ala
  MOD_RES (31)..(31): Lys(N-dodecanoyl)
  c-term amidation

SEQ ID NO: 756 - protein, 30 aa, Artificial Sequence
  Description of Artificial Sequence: Synthetic modified hGLP-1 peptide
  MOD_RES (28)..(28): Beta-Ala
  MOD_RES (30)..(30): Lys(N-dodecanoyl)
  c-term amidation
SEGTFTSDVSSYLEGQAAREFIAWLVRXRX

SEQ ID NO: 757 - protein, 30 aa, Artificial Sequence; identical to SEQ ID NO: 447
  Description of Artificial Sequence: Synthetic modified hGLP-1 peptide
  MOD_RES (29)..(29): Beta-Ala
  MOD_RES (30)..(30): Lys(N-Aec-decanoyl)
  c-term amidation

SEQ ID NO: 758 - protein, 30 aa, Artificial Sequence
  Description of Artificial Sequence: Synthetic modified hGLP-1 peptide
  MOD_RES (29)..(29): Aib
  c-term amidation
HSEGTFTSDVSSYLEGQAAREFIAWLVKXR

SEQ ID NO: 759 - protein, 30 aa, Artificial Sequence
  Description of Artificial Sequence: Synthetic modified hGLP-1 peptide
  MOD_RES (29)..(29): Aib
  c-term amidation
HSEGTFTSDVSSYLEGQAAREFIAFLVKXR

SEQ ID NO: 760 - protein, 30 aa, Artificial Sequence; identical to SEQ ID NO: 759
  Description of Artificial Sequence: Synthetic modified hGLP-1 peptide
  MOD_RES (29)..(29): Beta-Ala
  c-term amidation

SEQ ID NO: 761 - protein, 30 aa, Artificial Sequence; identical to SEQ ID NO: 758
  Description of Artificial Sequence: Synthetic modified hGLP-1 peptide
  MOD_RES (29)..(29): Beta-Ala
  c-term amidation

SEQ ID NO: 762 - protein, 30 aa, Artificial Sequence; identical to SEQ ID NO: 744
  Description of Artificial Sequence: Synthetic modified hGLP-1 peptide
  MOD_RES (29)..(29): Beta-Ala
  c-term amidation

SEQ ID NO: 763 - protein, 30 aa, Artificial Sequence
  Description of Artificial Sequence: Synthetic modified hGLP-1 peptide
  MOD_RES (29)..(29): Aib
  c-term amidation
HSEGTFTSDVSSYLEGQAAKEFIAWLVRXR

SEQ ID NO: 764 - protein, 30 aa, Artificial Sequence; identical to SEQ ID NO: 763
  Description of Artificial Sequence: Synthetic modified hGLP-1 peptide
  MOD_RES (29)..(29): Beta-Ala
  c-term amidation

SEQ ID NO: 765 - protein, 30 aa, Artificial Sequence
  Description of Artificial Sequence: Synthetic modified hGLP-1 peptide
  MOD_RES (29)..(29): Aib
  c-term amidation
HSEGTFTSDVSSYLEGQAAKEFIAFLVRXR

SEQ ID NO: 766 - protein, 30 aa, Artificial Sequence; identical to SEQ ID NO: 765
  Description of Artificial Sequence: Synthetic modified hGLP-1 peptide
  MOD_RES (29)..(29): Beta-Ala
  c-term amidation

SEQ ID NO: 767 - protein, 30 aa, Artificial Sequence; identical to SEQ ID NO: 389
  Description of Artificial Sequence: Synthetic modified hGLP-1 peptide
  MOD_RES (29)..(29): Aib
  c-term amidation

SEQ ID NO: 768 - protein, 30 aa, Artificial Sequence
  Description of Artificial Sequence: Synthetic modified hGLP-1 peptide
  MOD_RES (2)..(2): Abu
  MOD_RES (29)..(29): Beta-Ala
  c-term amidation
HXEGTFTSDVSSYLEGQAAKEFIAWLVKXR

SEQ ID NO: 769 - protein, 30 aa, Artificial Sequence
  Description of Artificial Sequence: Synthetic modified hGLP-1 peptide
  MOD_RES (29)..(29): Beta-Ala
  c-term amidation
HVEGTFTSDVSSYLEGQAAKEFIAWLVKXR

SEQ ID NO: 770 - protein, 30 aa, Artificial Sequence; identical to SEQ ID NO: 768
  Description of Artificial Sequence: Synthetic modified hGLP-1 peptide
  MOD_RES (2)..(2): Beta-Ala
  MOD_RES (29)..(29): Beta-Ala
  c-term amidation

SEQ ID NO: 771 - protein, 30 aa, Artificial Sequence; identical to SEQ ID NO: 768
  Description of Artificial Sequence: Synthetic modified hGLP-1 peptide
  MOD_RES (2)..(2): Abu
  MOD_RES (29)..(29): Aib
  c-term amidation

SEQ ID NO: 772 - protein, 30 aa, Artificial Sequence; identical to SEQ ID NO: 769
  Description of Artificial Sequence: Synthetic modified hGLP-1 peptide
  MOD_RES (29)..(29): Aib
  c-term amidation

SEQ ID NO: 773 - protein, 30 aa, Artificial Sequence; identical to SEQ ID NO: 768
  Description of Artificial Sequence: Synthetic modified hGLP-1 peptide
  MOD_RES (2)..(2): Beta-Ala
  MOD_RES (29)..(29): Aib
  c-term amidation

SEQ ID NO: 774 - protein, 30 aa, Artificial Sequence
  Description of Artificial Sequence: Illustrative synthetic modified hGLP-1 peptide
  MOD_RES (2)..(2): A5c
  c-term amidation
HXEGTFTSDVSSYLEGQAAKEFIAWLVKGR

SEQ ID NO: 775 - protein, 30 aa, Homo sapiens
  Illustrative hGLP-1(7-36)
  c-term may or may not be amidated
HAEGTFTSDVSSYLEGQAAKEFIAWLVKGR

SEQ ID NO: 776 - protein, 31 aa, Homo sapiens
  Illustrative hGLP-1(7-37)
  c-term may or may not be amidated
HAEGTFTSDVSSYLEGQAAKEFIAWLVKGRG

SEQ ID NO: 777 - protein, 32 aa, Homo sapiens
  Illustrative hGLP-1(7-38)
  c-term may or may not be amidated
HAEGTFTSDVSSYLEGQAAKEFIAWLVKGRGR

SEQ ID NO: 778 - protein, 30 aa, Artificial Sequence
  Description of Artificial Sequence: Synthetic modified hGLP-1 peptide
  c-term amidation
  MOD_RES (1)..(1): Tma-His
XAEGTFTSDVSSYLEGQAAKEFIAWLVKGR

SEQ ID NO: 779 - protein, 30 aa, Artificial Sequence; identical to SEQ ID NO: 389
  Description of Artificial Sequence: Synthetic modified hGLP-1 peptide
  c-term amidation
  MOD_RES (29)..(29): Beta-Ala

SEQ ID NO: 780 - protein, 30 aa, Artificial Sequence; identical to SEQ ID NO: 5
  Description of Artificial Sequence: Synthetic modified hGLP-1 peptide
  c-term amidation
  MOD_RES (29)..(29): Aib

SEQ ID NO: 781 - protein, 30 aa, Artificial Sequence; identical to SEQ ID NO: 5
  Description of Artificial Sequence: Synthetic modified hGLP-1 peptide
  c-term amidation
  MOD_RES (29)..(29): Beta-Ala
